United States Patent Application Publication US 2026/0271966 A1 - sequence listing, part 5

SEQ ID NO: 27 - DNA, 4063573 bp, Bacillus amyloliquefaciens (residues 1-2,031,787 of 4,063,573)
  source 1..4063573: mol_type = genomic DNA; strain = Strain 006 ELA191006 ATCC PTA 1267065
gatacatcgcaatttgtcttgggaaagccactgatttcgtacgctttttcgctttgaaatcttcaagcttaatgttgaactgctgtccgacaatccgctgaatctcttttatcgtaatgaccttcggcttagaagacggaataatatctttcaatgcttctgcagccaggtctgcgttaatgtctttattgattaaggatgaataggcgacaacccggattaatgccccttccagttcgcggatgttgctgtcaatctgattggcgatgtaaagcatgacctcgttcggaatatcaaggccctccgccttcgctttctttctcagaatggcaatccgcgtttccagatccggcggtgtgatgtctgtaatcaatccccattcgaaccgcgaacgcaggcggtcttcaagggtcgggatctctttcggcggtctgtcactggaaatcacgatttgtttgctttcttcatgaagtgtgttgaatgtatggaaaaactcttcctgtgtttgttcttttccggctaaaaattgaatatcatctatcaaaagtacatcaacgttccggtagcggttgcggaaatcaacggctttattatcgcggattgagttgatgaattcatttgtgaatttttcagaagacaggtacaccactttggctgaaggattatgatcaatgacataatggccgatcgcgtgcattaagtgggtttttcctaaaccgactcccccgtatataaataaagggttgtacgctttagcgggtgcttccgccacagccagtgatgctgcatgggcgaatcggtttcccgatccgatgacgaatgtgtcgaatgtatatttcgggttgagcatgctttggggaaaatcagacggttcctcttttgccgcttttttcacttgcggtttcggcaaaaagtcttcttcgtcctgattttgaggaatgacaaatttgacgctcaattcttccccggttaattcatatatggtatctgcaatgagatgtaagtacctggactccagccagtctctggcaaattcattgggagcggtgatggttaaggtatctccttgcagcgaatgggctttcgtcgacttcatccaagtttcgaaactcggtttgcttagctttttctcaatttgagctagagcttgattccaaagatccaatatattctccattatccggcacagccctccttttctttaaaaatcagcgcccttcccctgttatagaacacaaaaaaagagcatatggctctgaccattcgtacacacgaaatgttgaaaacatatagtatagtagaaaaatagcttttcgacaaattccacaagttgtggacaacaatctacacaagctgtgtgaaaacaatccacaacttatccacaatttgtggataaagagaatggactggataagtaattaagagttaaaacacaaatataatatcaaattaagcgaggacttgcaatggttctcgtaatcttatccacaaacctgacaacttgttgaaaaatctttgtccacaggggttagcaatgtgaaaatgttgtcgataacgattgtggatattaaaaaaagaccgaaaaattatccacatgtcgttttttcgggggagcgcggctttttttgtgcgttaaaaaaaggaatatgaaaaataaggtttctaatctggttaaggtatgttatcctattatggttgtaagaaataaaagcactgctgaagttgacaatgaataggcagcacaaatataataagtaagactgtctttaacagctattcctcgagggaggtgtcataaatgaaaagaacattccaaccgaataaccgtaaacgcagtaaagttcatggcttcagaagccgtatgagttcaaaaaacggtcgtctagtattagcacgccgtcgccgcaaaggcagaaaagtattatcagcttaggccactgaataatgtcagtggtcttttttcacattaagagaaaagagatgtcatgcgtcgcccggtactggagaaatttcttcagtattccggcggcccgttttttttagatagaaataaaagtttctgcgagtgaatatcggagtgaattaaagtgaagaagcgaaatcggttaaagaaaaatgaagattttcaaaaagtgtttaaacgcggaacgtctatggcaaaccgccagttcgtgctgtatacgcttgatcagccgaaacaggaagagctccgggtagggctttctgtcagtaaaaaaatcggcaatgccgtcgtgcgcaatcgggtgaagcggttaatcaggcaggcggttcaggaggaaaaagagctgctcaagccgaaagattttattattatcgcaagaaaacccgccggcgacctcagttttgaagaaacgaaaaagagtctgcagcacttattcagaaaaacctcattatataagaaatcttcgtcaaaatagctcatattttgttttcttcacgtttttaaaagcgcttccttttatttggcgaaaaatgaacgccatttgaaactgaaagatgctaaaatacatacaaggtttataaagattggtataggaggaaacgttcttgaaaaggagaatatggttactactgagtatggtcggtatgctcgtgctgctggccgggtgctcgagtgtgaaagagccgattacggcgaatagtccgcatttctgggacaaatatgttgtgtatccattgtcagaagtcattacgtacgtagcgaaactgacgggcgataactatggtttgtcgatcatcatcgttacgattttaattcgtctgctgattctgccgctgatgatcaagcagcttcgaagctcaaaagcgatgcaggcgctgcagcctgaaatgcagaagctcagagaaaaatacagctctaaagatcaaaaaacgcagcagaagcttcagcaggaaacaatggccctgttttcaaagcacggggtaaacccgctggcgggatgtttcccgatcctgattcaaatgccgattttgatcggattctaccacgccattatgcgtacgcaagccatttcacagcacagctttttatggtttgatttaggagagaaggatccttactatattcttcctatcgttgccggtgtggccacttttgtccagcagaagctgatgatggcgggaaatccgactcagaatcctcaaatggcaatgatggtatggattatgccgatcatgatcatcgtatttgcgatcaacttcccgagcgcgctttctctgtattgggtagtcggaaacctgtttatgattgctcagacattccttattaaaggacctgacattaaacacgatccggaaacgcagaaagccggaggaaagaaaaagtgaagaaggtgactgctgcgggacggaatgtcgaagaagcagttcaatcaggccttcaggaacttcaactgacgaaagatcaagtagaaataacggtggtgcaagaagaatataaagggtttttgggtattttcggaaaaaagaatgcgattgtagaactggaagagaaaagaaatcctgttcaggaagcgaaagcgtatttagaagaaatcatccattccattgccgggccttctgagattgttacggaagaaaacaagaaaacagtctgttttcatattaaaggtgaaaaagcggcgctgcttattggcaaaagaggacaaacactcaatgccttggaaacattgacgcagcttgttttgaaccgcggctccggccagtatcgccaagccgttgtcgacgctgaaaattatcggcggaaaagaagagaaattctggatcagctggcaaacaggctggccaagcaagtgtcgaaaacgaaaaaagaggtgcatttagaaccgatgccgtcaggtgaaagaaaaatcatccatgacgcgctgtcaaagcatccaaatatcaaaacgttttctaccggtgaaggccggtaccgccatctcgttatttcccataaagatagcagaaaaccgaagtccgggtaaaatcggaacttcggtttttttattggtaaaaatggctctattcctgagcagaatcgcattttttgcgtttaagttttttctttttaggtctatgctgttgataaaaaaggttttaggaaataaaattaattgttattcacatgtggataagttaaagtaataagggatgaatttctgcctttgtggataacgtatcttccacttcaaaccaaactatgttatcttttaattttggcgtaaataaaattttttatatagatggaaacagagataaagagaggtgaacagtatggatacaattgcagcgatttcaactccgatgggtgaaggcgcgattgcgatcgttcggctgagcggcccggaagccgtaaagatcgccgacaaaatgtacaagggtccgaaaggcaaaacgctcagttcggcagaatcgcataccattcattacgggcatatcgcggacagtacgacgggacggattattgaggaagtcatggtgtctgttttaagagcgcccagaacattcacaagggaagatgtcattgaaatcaactgtcacgggggtattgtgacggttaatcaggtgctccagcttgctttaagagaaggtgcgagactggcagaacccggtgagtttacgaagcgcgcatttttaaacggacggattgacctttcacaggcggaagcggtgatggatctgatcagagccaaaacggaccgtgccatgaatgtcgccatgaaccagatggaaggacggctttccgcgcttgtccgccgtctgcgtgatgagttgttagaaacacttgcccatgttgaggtaaatatagattatccggaatatgatgacgtcgaagaaatgacgcatcagcttttagtggagaaggcaagcggcgtgaagaaagaaatcgaggcgctgctccgtacgtctgagcaggggaaaattttgcgtgagggactgtctaccgtgatcatcggccgtccgaacgtcgggaaatcctctctgcttaacagccttgtccatgaaacgaaggcgatcgtaaccgatattccgggaacgacgcgtgatgtgattgaggaatatgtcaacgtgcgaggcgtgccgcttcggcttgtcgataccgccggaatccgtgagacagaagacatcgtcgaaagaatcggtgtggaacggtcacggcaggttctgaaggaagcggatctcattttgcttgtgcttaaccacagcgaagcgctttctgaagaagatgtgaaattgtttgaagcggttgagggaatggacgtcattgtcattatgaataagacggaccttgaggctaagattgacgctgagcgcgtcaaggaactggcgaaaggccggcctgtcgtcacgacctcattgctgaaagaagaaggcattcaagatttagaggaagcgattcagtcgctattttatacaggagcgatcgaaagcggagatctcacctatgtcagcaacacccgtcatatttcgattctgcatcaggcaaagcaagcgattgatgatgcgctgaacgggattgaacaggatgttccgattgatatggtgcaaattgatttgacaaggtgctgggaactgctgggcgaaatcatcggtgatgccgttcacgaaagcttaattgatcagctcttttcacaattttgtttaggtaaataaaagggaggaaaaaaccatggggtatgaagcaggccaatacgacgtgattgtcatcggcgccgggcatgccggtgttgaggctgccctcgcatccgcgcgccagggagccaaaacgcttgttttgacgattaatcttgatatggttgcgtttatgccatgtaatccgtctgtcggcggccccgcgaaagggattgtcgtccgcgaaattgacgcgctcggcggagaaatggctagaaatatagataaaactcatattcaaatgagaatgctgaatacaggaaaaggtccggccgtacgggcgctgcgtgcgcaggcggataaattccaatatcagcacgaaatgaagcatacgctggaaaaaacaccgaatttgacacttcttcaagggattgccgagcgtttaatcattgaagacggagagtgccgcggtgtcattacgcaaaccggtgctgaatacaaggcaaaaacggtcgtgctgacaaccggaacgtatttaagagggcggatcattctcggggatctgtcttactcaagcggtccgaataaccagcagccgtctattaaactttctgagcacttagaggagctcggttttgatctcgtccgttttaaaacgggcacgcctcctcgtgtctcaagcgattccattgattacagcaaaacagaaatccagccgggggacccggttccgcgcgctttctcatatgaaacggttgaatacattaccgatcagctgccttgctggctgacttacacgagtcctgagactcatgagatcatcgacagcaacctgcatcgttcgccgatgtattccggtatgattaaaggaacgggaccgagatactgcccttcgattgaagataaagtcgttcggtttaatgataaaccgcgccatcagattttccttgagccggaaggcagaaatacgcaggaagtatacgttcagggtctatccacgagtcttcctgaggacgtgcagcagcggatgctggcgaccattccgggactggaaaaggtgcagatgatgagagccggatacgcgattgagtatgacgcgattgtaccgacgcagctctggcctacactggagacgaaaaaaatccctaacctgtacacagccggtcaaattaacggtacatcaggttatgaggaagcagccgggcaaggaattatggcagggatcaacgcaggccgcaaagcgcttggaaaagaagaagtgatcctcagccgttccgatgcttatatcggtgtattgattgatgatttggtaacgaaaggaaccaatgaaccgtatcgtctgctgacttcacgggcggaatacagactgctgctccgtcacgacaacgcggatcttcgcctgacggaaatcggccatgagatcggcttaatttctgatgagcgctatgaagcgtttgagaagaaaaaagcggcgatcgaggcagagaaaaaacgtctctggtctgttattatcaagccgtctcctgagaatcaggaatatatccgttcactcggcggaagcgagctgaaagacggagtgcgcggcacagatttaatgaaacgtccggaaatgaactatgaaacagtgacaaaacttgcgcctgcagattctccggttccgcaagatgtggcggaacaagtggaaattcaggtgaaatatgaaggatatatcgaaaaatccttgcagcaagtggaaaagctgaagaaaatggaaaacaaaaaaatccctgatcggattgattatgacgccattaaaggaattgctactgaagcgcgtcaaaagctgaaagaagtgcgtcctttatcagttgctcaagcgtcccgtatttccggcgtcaatccggcagacatttcaatcctgctggtatacctggagcagggccgtattgccaaggtagctgaatagaaaggatgacggcatgaatatagagcaatttacatccagtttagcggagaaagggatttccctttctgaccgccagctggagcaattcgagttgtattaccggatgctcgtggaatggaacgaaaaaatgaatctgacatccatcactgagaaaaaggaagtttatctcaagcatttttatgattcgataacggcggcattttatattgattttgaaaaggtcaccactctttgtgacgtcggcgccggcgccggttttccaagcctgcccgtcaaaatctgcttcccgcatctgcatgtcaccatcgtcgattcactgaataagcggattacgtttttggaaactctctctgatgctttacaattagagcatacgacatttgtccatgacagagcggagacattcggacagcggaaagacgtccgggaaagcttcgatctcgtgacggcccgtgcggtggcgcgtctgtcggtcctgagtgagctttgtctgccgctggccaagaaaaacggtatttttgcggcattaaaagctgcagccgctgatgaagagctgaaagcggggcaaaaggcgattaaagtattgggaggagagcttgaacaagttcattcctttacacttcccgttgaagaaagtgaacggaacattatgatcattcgcaagacgaaaagcactccgaaaaaatatccgagaaaaccgggtactccaaataaatcgccaattgaagggtaatttagacagcctgatgtgacaattccatcatattttctgcaaaattgatgaagatacagcaggaaaaaccatgagaaaatagaattataaaaatggcagtttttaaaggtggtgtaggtacatgaagcattcattctctcgtttcttcgggtttggtgagaaggaagaggaaccggagatagctgagcatgatacaaacaaagaagagatactcgaaataccggtacatgctatcgttcccaaccgttttcagccacgcaccattttctcagatgaaaaaatcaaagagttagcaatgactatccatacacacggcatcattcagccgattgttgtcagacatacagaagatgaaggacaatatgagctcattgcgggtgaaaggcgctggagagcggtacagacgcttgaatgggagaagattcccgcaattattaaagatttttctgatacggaaacagcatctgtcgctttgattgaaaacctgcaaagggaagaattgtcctccattgaggaagctcatgcgtacgcaaggctgttagaacttcatgatttaacacaggaagccttggcgcagcgcttaggaaaaggccagtcaacgattgcgaacaagctccgattgttaaagctcccggaacccgtccaggatgcgattatggagaaaaaaattacggaacgtcatgcaagagcactgattccgctcaaacagccggagtttcaggtcacattgcttgcggaaatcattgagaaaagcttaaacgtcaagcagacagaagacagagtggtgaaaatgcttgaacagaataagcagaaaccaaagccgagacgcaaagcgttcagcagggatacaagaattgcgatgaatacgattcgtcagtcactgtccatggtggaagacagcggcgtcaggctgaacactgaagaagaagaattcgaagagtacatccagcttaccattcggatacctaaataaaaactctcctgatcagcaggggagtttttattttaatcaaaaaactattttgagataatgatagatttattgtgcactatacattatatatgtaaaattttatctttttgtgtcgtgaattgtctttttacagtcaaaaaagtcactttatcggagaacttatattagaaagtgtctttttcgtttacatttttttcacttgctgataaacaaattatgaaaaaaataaaacgctttactctttttttgataagatagaaacaagacagtacatgttcatgtgaaggtaggtgacatcgtgggaaaaatcatagcaattacgaaccaaaaaggcggagtcgggaagacgacgacttctgtcaatctgggggcttgcttggcttacataggtaaaagggttcttcttgttgatattgatccgcagggcaatgcaacgagcggattagggattgaaaaagccgatgtggatcattgtgtgtacgacattttagtagatgatgcagatgttacagatattattaaaccgacttcagtagagaacttagatgtcattccggccacgatccagcttgcgggagcggaaatcgaattggttccgacgatctcacgggaggtcaggctgaaaagagcattagaatctgtgaaacaaaattacgattacatgattattgattgtcctccgtctctcgggttattaacgattaatgcgcttaccgcttcagattcagtcgttatcccggttcagtgcgaatactacgctcttgaaggattgagtcaattattaaatacagttcggcttgtgcaaaaacatttaaataccgacttaatgatagaaggagtgcttctgacgatgcttgatgccagaacgaatctcggcattcaagtgatagaagaggtaaagaaatactttagagataaagtgtatcaaaccattattcctcgcaatgtccgtttaagtgaggcgccgagtcacggcaagccgatcatattatacgatccgcgttcgagaggtgcggaagtatatttagatttagcaaaggaagtggcagcgaatggctaaaggcgggctcggaaaagggattaacgcgttgtttaatcaggttgatttgtctgaagagacagtggaagaaattaaaatcagtgatttacgccccaatccttatcagccaagaaaacaatttgatgatgagtcattagctgaactgaaggaatccatcattcagcatggcattcttcagcccattatcgtgagaaaatcattgaagggctatgatattgtagccggcgaacgccgttaccgcgccgcaaaacttgccggtaaagagacagtgccggctatcgtgcgggatttatctgaatcgctgatgcgggaaatcgctcttttggaaaaccttcagcgtgaagacttatcaccgcttgaagaagctctggcatatgactcactgctgaagcatttggatttaacccaggaacagctcgctaaacggctcgggaaaagcaggcctcatattgccaaccatttaagactgctgacgctgccggaaagcatccagaacctcattgcagaaggtacgttatccatgggacacggcagaaccttgcttggcttgaaaaataaaaacaagcttgaaccgcttgtgaagaaagtggttgaagaacagctgaacgtccgccagcttgagcagctgattcagcagttaaacaacaatgttccacgtgaaacaaagaaaaaagaacctgttcaagatgttgtgttaaaagagcgggaatcgtatttgcaaaattacttcggaacaacagtcaatattaagagacaaaagaaaaaagggaagattgagattgagtttttctcaaatgaagatcttgaacgtatcctggaactattgtccgaaagagaagcgtaaaaaccatcttttttaaaaaagatggttttttatatacgtcttgtcagcttatgaaacggactgagccgttcctgccggccttctgatttatctgtcagctgtaacccctctgctaaaacatttgccatgctcataacaagatgaagcctcgtattctgcaggacaaaatactccataaacccgctgacattgacgattccattgatatggacgtcaccgatttcaggaaggtctttttgaacacctgctccgggcttcagcggcccatcgccgatttgaaatgagcctacgcttttgacgcggcctaaacaagcatcaaccgctataataaacggatttttatgtagatgttgaatatctttcagcttgtctttcatattgacggcgtgaacaggatctgacagcgtgccgtaaacgtgcaatctgcctaaattcattttttctaactttgttcctacgagcggacctaatgaatctccggtcgaccgatctgtaccgatacacacggtgactaacggtctgccggctgctttacgtaaagatgaagtaaggattgcttgtatttgattcgcagcagaagaatccgtatgggatacatattgttttgcccgttcttgagaaaaaagcccgccttttcgattcataaggttcacttccttgtcatgtcatacgagtattacattgttgtttttggtgatgtatggttgtttacagtatatccagcgctgcctttttttatgcttatgtcatgatgagcatgccggttgtttgaaaagagcggatagaaaaaagaactcagagcagttattctctaagttcatgaaagaaataagaccatatgatctacatcaacatattgctgatgatctaattccagcgctcttttttctgcagagaagaggataatcctaactgagcgcagagtttttttgcgggttccatttgttgaagtaacagagagatggagctgttctgtgtctttcatcttttttgcccggctgatggcttccgtcattaaagcttttcccgcgcctgaccctaggtgtttgggggaaatatacatagaaccgataaccgcaatgtgtcttagtttaaacagcagatgcttggagatcttgaggattcctatcaggctgtcttgttcaaaggcgccaagcaagatggcattgccggcttcaagcctggctttgcatttttcggacggcctcatagctgacggcgattgcgtccgggtgatcttttaaagctttgagcctgaatcggagtaaggctgggtatcacttgcggttaaacgcctgatgtccatgatttgagcgcctaacataaataaattttctgaatagtcaatcgtcgttatcataccatatttgtcccatttgtatgaatgtttgctgctgtcactcaatatagtagcaatatgcggagatgatcagaaattttatgaggtgatgagggtgtggagagccgggatgaagtggatgctgctcatattaagcagccagattggggccgggtatgcaagcgggcaggaaatatggcagtttttcggtgtcgaaagcggactggctattgtattgtttacagtcatgtttacgatttcggcttatattgtgttgaagatcagctatcgggttcaatcaacgcactttttacctgtgcttgagcatctgatgggaccggctcttgctaaagtctatgatgtgcttattatgttttatttgttttcaatgacgatggttatgattgccggcggcggtgtgacgctgcaaatgtacaagctgccgttttggatcggtatttttcttctttgcattgtgaccgtgggtttattcttttgggatataaaagggatattatctctgaatagtattttgataccgattcttgtagcggggctgttatatgcattggtcttttttcagacaacgcatcattacacgtggacgatagacttgacccgccagtataattggccggcaagcattaccttcacgtccttaaacattctttctgttgtcgctgttctttcttcaatcgggaaagatatgaagggactgggagaagccaaaatcgcaagcgttgcaagcgggctgattttcggtatgatttcatttgtttacaatgaaacgcttgtacagctttcaggcagtcttacacaatatgagattcctcttttcgccgtccttgaaggcgctccttatccgttatttctttgtatggccgccgtgctttttttagccatctatacgacaacggtgaccggtcttttcgggctgtccagccgcatgcttgcatttgtgaaattgccgagatggacgctcgtatctcttcttttagctgtgatggtgccttttacgacaatcggtttttcagatttgatcgccattttatatcccatttacgggcttttaagtctttatttgctggtatgtcttcttctttaccctattttagggagatggaaaaaagtataatgctcattttgagtgcggccgttgctcttatcctgtctttttttgtacaataaataaagcagtctatggagagaggtgaagggtcttggcggataaagactttggcctgaatgatattgttgaaatgaagaaaccgcatccttgcggtgaaaacaggtggaaaatcattcggatgggaatggatattcggatcaaatgcacgggttgttcccacagtgtcatgattccgagaagagattttgagagaaagctgaaaaaagtactcgtcaagcatgaggagcctacatcataagggctggcgctcatgctttttcatatagaggagaggaagaggcccgatgagcaaagtgcatcagtcagcgtgcccgctgaattgctgggacagctgcggctttttggtgacagttgaggatggaaaggtgacgaaagtagacggagacccgaatcatcccattacggaagggaaaatttgcggccggggcagaatgctggagacgaaaacgaatgcgccggaacggcttcgttttcctttaaaaaagaaagacggcgaatttgtccgcatttcctgggagcaggcgttagatgaaattgctgaaaaaatgacggtgattaaggagacgttgggcactgccgcagtgctgcacagtcatgactacgccaataacggtcttttgaaggcgctcgaccagcgttttttcaatggatacggcggtgtaaccgagattgcgggcagcatttgctggggttccggcattgaagcgcagcgctgggatttcgggcgttcttacgggcatggaccgcttgatatttatcacagcaagcatgtgatcgtatggggcagaaacgtgtcccggacgaatatgcacctctatcatcatctgcagcaggtgaagaaaaaaggagcgacactgacggtcattgaccctatttttaacccgactgcaaagcttgccgaccggtatatatccgtcaaacccggcatggatggctggcttgcggcgggtgttttaaaaatattatgccaaaccggcagaaccgattctgattttattcaaaagcattcggtcggttttgaggaaatagacaagcttctgcagacgatttcttttgaggagatcattgagaaaacagaaacgtctttagaagcgcttgaatatcttgccgatttatatgctgacggtcccgcctccacttttatgggtcttgggatgcagagatataaaaacgggggcgggacgatacggtggattgacgctttagctgcggcgagcggaaatgtcggtatcaaaggcggcggcgccaacttcggaaatgtgcaagtcggtgaaagctttgcaaaggccgagctcactcgtcctgatttgaagaaaagttcgagaacgttttcgatgatgactcaagctgaagaggcgctgaatgcagccgacccgccgattgagatgatcatcgtgacgtgcggcaatccgctgacacaggtgccgaatacaaaaaaagtgaaggaagcgtttgaaaaaacgccggtcacagtggccattgattcggtcatgaccgatacggcgaagctctgtgactatgtgctgccgacggccgttgttttcgaagaggaagatatttattattccagcatgtatcatcactatgttcaatatggtaagaagcttgcggaaccgcagggagaggcaaaatcagaccgctggatctggacggaactcgcaaagcgtctcggattcggggagctgtttgattacagtgcggaagatttcttaaaaatggggctctcttctttggagaaagaaggaatcacccttgagcaattaaaggaaaaaggacatatgccgcttccggttaaacaggttccgtggagtgattttcaatttttaaccccgagcggaaaatttgaattcgtctcgtcactggcagaagagaaaggatacagcggcctccctcaattggaagtgccggaggagtccgtttatcacgacgccggactggccgggaaatatccgtatacgctgctgtccattcacccgcagcgctccaatcattcacagcacgtgccgtttattgaaaagctccagcagattcaggtggacctgtcgccggatatcgccgaggagctttcacttcaagacggagatacggcagaggtatacaatgaccgcggccgtctgcgcggcagggtgaaaatcatgaagcaggctcacccgaagacggtgaatatagatgaaggcatgtgggcggcattcggaggctccgtcaacatgctcacaaaggattcaaattccgataatggaatgggaagtacgctttttgactgtctggtagcggttaaaaaagggtaatctaaggagagagagggcgggaaatgcttttttctcagcttgtcttttcctatgaacctccttataattgctctaggtttacaatacgtttatacgatgatggtttgatatagaggagatgaaagaatggctttaactgctggaattgtcggtttgccgaatgtcggaaaatcgacgttatttaatgcaattacccaggctggtgccgaatcagccaactacccgttctgtacaattgatccgaacgtgggaatcgtggaagtgccggatgaacgtctgcaaaagctgactgaattggtgaacccgaaaaaaacagtgccgactgcgtttgaattcactgatatcgcggggatcgtaaaaggcgcatctaaaggtgaaggactcggaaataagtttctttctcatatccgtcaggttgatgcgatctgccacgttgtacgtgcattcgctgatgacaatattacgcacgtgtcagggaaagtcgatccgattgacgatattgaaacgatcaatcttgaattgattcttgccgacatggagacagtcgaaaaacgcatcacgcgtgtaagcaagcttgcgaagcaaaaagacaaagaagcggtttttgaatttgacattctgtctaaattgaaagaagctttcgaacaagaaaagcctgcccgttccgttgaatttacggaagaacagcaaaagcttgtgaagcagcttcatttgcttacgtcaaaacccgtgctttatgtggcgaatgtaagcgaagatgaagtggctgatccttcagacaatgaatacgttgcgaaaatccgtgagtacgccgcgggtgaaaatgccgaagttatcgtcgtctgtgcgaaaattgagtctgaaattgctgaattggaaggcgaagaaaagcaaatgttccttgaggagctcggcatcgaagaatcaggtcttgatcagctgattaaagcgtcatactctcttctcggccttgcgacatactttacggcgggcgaacaggaagtgcgcgcatggacattcagaaaaggcatgaaagctcctgagtgtgcgggtatcatccacactgactttgaacgcggctttatccgcgctgaaacggttgcttatgaagaccttttggcaggcggcggaatgtccggagcgaaagaagccggaaaagtgcgtctggaaggtaaggaatatgtagtccaagacggagatgtcattcatttccgatttaatgtataggacacagttgtaaagggacaagagctttggtataatataaacttgtgagtaatagaattattgctccttgcccattatagggccgcttagaccaaaaggaggtgcaaacagatgaaaaagtacgaagttatgtacattatccgtccgaacattgacgaagagtcaaagaaggcagttatcgagcgtttcaacaacgtattgacttctaacggagcggagatcactggaacaaaagattggggtaaacgtcgtcttgcttacgaaatcaacgatttccgtgacggtttctaccaaatcttaaacgttcagtctgaagctgcagcggttgctgaattcgaccgtttagctaagatcagtgacgatatcattcgccacatcgttgttaaagaagaagaataagcaatttgaaatatataatgttaaaaggtggtctttcatatgcttaaccgagttgtattagtcggaagactgacaaaagacccagagcttcgttatacgccaagcggtgcggctgtcgccacgtttactcttgctgtgaatcgtacattcacgaaccagtccggagaacgtgaagccgatttcattaattgtgtcacttggagaagacaagccgaaaacgttgcaaactttcttaaaaaaggaagccttgccggcgtagacggccgactccagacaagaaattatgaaaatcagcagggacagcgtgtcttcgtgacagaagtccaagctgaaagtgttcaatttcttgagcctaaaaacagcggcggttctggatcaggcggatacaacgaaggaaacagcggcggaggccaatactttggcggaggccaaaatgataatccgttcggcggaaatcagaacaaccagagacgaaatcaagggaacagctttaatgatgatccatttgccaacgacggcaagccgattgacatctcggatgatgatcttccgttctaatagattatcgctatattcataacgagaaaggtgggaaatgacaatggcaggaggacgcagaggcggtcgtgcgaaacgccgtaaggtttgttacttcacttctaacggcattacgcacatcgattacaaagatgtagatcttcttagaaagtttgtttctgagcgtggtaaaatcttacctcgccgtgtaactggaacaaacgcgaaataccaacgtaaattgactatcgcgatcaaacgcgcacgtcaaatggctttacttccatacgtaactggcgagtaagccgaaagaaaagagcaagagcctgcgggctcctgctctttttttatatcagtcctcctccatcctgccgaaatgtttcacatgaaacatggaagtgctcctgacatctatctttgttatcttgctcctctattcaaatacgcgtacttatgcaatgaatttgtttatactgaagaacagggggtggctgagatggagacagacagaaatatcctgactgatgaaaagtggagcgcaatcatacgcaatgatgcttcttatgacggggcattttattatgcagtaaagacgacggggattttctgccggccttcttgtaaatcgagagctccgaataaagaaaacgtgctggtgtttgatacggctgatgcagcgcttgataaacattttcgtccctgtaaaaggtgccggccgaacggtcttcgtcttcctgatgaagaatggattgctcaaatcattgagtacattgaccgccattatcacgaatctctgactctgagtgtactggccgaaatgtgtcacggcagcccttatcatttacagcggacatttaaaaaaatcaggggaatatccccgattgagtatatacagaacataagattggcgaaggcggaacaccttttaaagcatactgatatgacagtcatggagattgctctgacggtcggaattccaaacacagcgcattttgccactctttttaaaaagagaaccgggaattcgcccacagaataccgaaaaactgccggaatgggacagggaggttcaatatgagtaaagagacaatggtctattggacacttttcacacggaatgattggagcctgtatacagccgccacatctaaagggctttgctttataggttcaaatcatggaagctttgaagagcttgagcagtgggcaaaaaaatcactgccgcaataccgattggcacgtgatgatgagaagctggcgtcttacacggcagagctgtccgagtacatcgaaaatggcagatcagctttttcagtgccggtggatctttacgggacagaatttcagcttgctgtatggaaagcgcttatggacataccgtacggcgagacatactcctattcggatatagcagaaatgattcagaaaccggcagccgtaagagccgtgggcgccgcaatcgggaaaaatccggtattgattacggttccgtgccatcgcgtcatcggaaaaaacggaaaactgaccggattcagaggcggtttagaaatgaaaaagcagatgctggcattagagggcggaaacattgaaacactggaatgccggctgagccggacaggggggaacacatgaaactgatttcttggaatgtaaacggcttacgtgccgtgatgaaaaagatagatatcaatacttacgttcaggaaacgaaagccgatattttatgtctgcaagaaacgaaagtacaggacggacaagtatcattacagcttgaagggtatcatgactattggaactacgcggtgaaaaaaggctactcaggcacggctgttttttcgaaagaaaagccgcttcacgtgttttatggactgggaattgacgatcatgatcaagaaggacgggtgatcacacttgaatttgagaacctgttcgtcgtcaactgttatacgccgaatgccaaacgcggattagagcgaattgattaccgtcttcaatgggaagccgattttaaggagtatctgcagaagcttgaccggaagaagcccgtgatattatgcggcgatctgaatgtcgcacacagggagatagatttaaaaaatccgaaagccaaccggaagaacgccggtttctcggatcaggagcgggaagcgttcagcgccctgctgaacaccggatttaccgactcattccgctatttatatcctgatcgggaaggcgcctattcctggtggtcttacaggacgaacgcacgtgagaaaaacatcggctggcggcttgattacgtcattgtttcagacagactgaagccgcggatcagcgaagcggccatttgcgccgatatcatgggttctgaccattgccctgttgaaatgacagtggatttatgatgagatagcagtaagagaaatccactcttgctgcttttttatcaccaaaaatggaggagcacatggcaaatataaaagagattgcgaaactggcgaatgtgtcggtggctaccgtatcacgcgtattaaaccgacacccgtacgtatctgaggagaaaaggcgtcttgtgaatcaagtgatgaaggagatggattatacccctaatcgaaccgccattgatctgattcgaggaaagaccaatacaatcggcgtgattttgccgtacagcgaccatccctgctttgacaaaattgtaaacggtatcacgaaggaagcgtttgcccatgattacgtgacaacccttctccccaccaactatgaccccgctatagagatgacctatttcgaactgctgaaaatgaaaaagattgacggactgattgtcacgtcccgcgcgaatgaatgggaaaccgctgtgccttatctggagtacggtcccattgtcgcttgtgaatatacgcagcatcaagagattccctgcgcttataatgacaggcaggcagcttacagagaaagctttttgtatttgaaaaaccgcgggcatcaagatgttgcttttacatgtgtgcgggaagcggaaaaaagcccgagtacggccgacaaggtaaccgcatataaggcggttttcggctctcttgatgaaacccgcattctgatcggatgccatgatatggacgacggaaagcgggcaggtgaacacttctggggtttccacaaggcgccgacggccatctatgcgcacagtgatgatgtggctgccggcttgtaccagtttgcgaaagaacagaaatgggacgcggagatcatcggcgagggaaacctgagcgtcagccgggcattgaatatcccatctctggaacttcatttggaacgggtcggaagggaagcatttttgctgtttttgcacggagaaacggctaaaaaacaaattatgcatcaatttcagcggaaaaagtcttgagctgaaatgggtttcatgctttataactagattgagaaaaaaaaaggaggcggacatatgcgaattgaacatgcggccatatgggtgaaagatttagaacggatgaaagaattttatgagaaatacttcggcgccaaggccaatgacctttatcataatgagaaaaaagatttcaaatcgtattttctttcgtttgactccggatgcaggctggaacttatgaaaaaaggcggcattgatgaagctccgtcacagaatatgaccggatgggcgcatctcgcattttctacaggcagcaaggagcgggtgaatgaattgacggagacgtttaaaaatgacggatttcaggttgtaagcggcccgcgcgtgacgggtgacggatattatgagagcgtgatagaggatggggaaggcaatttgatagaaatcacagtgtaacagtgcgggggaacccgcactgttttattgattaaatttgctgagcattagttttcggaccgaatagaattaacaaaacggaacatagaagccagcagccgccgatgaacaaaaagacgctgatgtagccgagcttaacggcaataaatccgacgagcagggatccgaatatattggaaaaacggccgagcccgtatgccagcccgctcccggccgagcgatattccgtaggatacggctccgatgtatatgcgtataagtttgaggtgaaaacccgttccgtgacattgacgacaaatccaaacacaataatcatgacgggaataaacgtcatgccgtataacagtccggcaatggcagtcagaaaagcgcttgcggccagaatccattttctttggaacgtctcggatatcatggaaccgagcaatgcgccaagcggtgcgccgacagagtgaagcacattgtaccacagcgttttttccatggtgatgccgttgcttttcagcaggctgggcacccatgaagcaaagccgtaaaagccaaaggtttcaagaatccataccgctgacaggatgatggtgatctttaaattcctgccctgaaacagccctaagtagcctgcgtgcttcactgtatgtacttctgccgcctcttttggcgcgggaagcgggcctttttctttctctatacgtgcttcaagacggttcataatggcgtttgcctgatcatatgcgccccgattttcgtgccagcgcggcgattcctcaagccggcggataaaaaagaaataaatgagaccggccgccccccatacgaatacgagccgccacccccatgagcctaaaggaatgacaaaagcggaaacaacgtttgtgacgggaacgccgatcagtccgatcatggcgcaaaaggagatgtattttcctcgtacggatgatggaaaaaattccgccaaatagctgttcgtcacaatcatggcggccgcgacgccgagcccggtcaagaagcggaaaatcattaaggacggaatgtcccatgccagcgcattcagaaaagatgagatcgaaaagacaaggacaaaacaattcagcgcttttttcctgccgatccgatcggacagtcttccgccgatggaggcgcctaaaaacatgcccaggaaggatgcggctgtgacgtcggcaatgacggacagcttcacgccccaatgctcaatcagcgccggagccacgttgctgagcgtaaacagatcagcgagatcgaaaaaatagatgattccgagagcggttaatacttgatagtgcacacgcgaaatggggagacggtctaatcggttcgctacatttgagaatgtctgatgtttcataaaaaaccccctgacttagcaattgtaatcagaaaatactgtaaatttatctgacgaatacattataaaggtctttttttggcaaaaacagagtgtaaataaccagagccaaaggaaacggcatagcgctttcttcttaaaatatataacatttcctatatctgtttctgtttatattgtaaaatgttgaaggaaaggaagttgatgcataaatatgaatacatttgtacggcccgcagagggaagaaatagtgtatcgagatatcttctttctctgttgctcattgtgggtttgttctttttcggaagcatactgaccgtgttttatatgtttctcacgtccgctttcaatccttcactgacgataaattgggatgaggcggcattaagtgacccgctggcggatatttatttacagcatatcgtctatttcatagcgattccgggcatttggatagcggttcgtttcattatgaagcggcggtttttatccatcattacaccgaatcagtcgctgaactggaagagaattttctttggattcggcacatatgttgtgctgatgtttgtcgcggggctgattgattttttaattcatccggatcgtttcacgcttcaggaattccatgcttcacgttttctgctgctgttagcggcggccgtcttgttggtgccgattcaaacctctgcggaggaatttctctttcgcggttttctgcttcagtttgccggaaaattgacggcaaacgcggtggttctgacggtcattatcggcggattattcggcgcacttcatttcggaaatccggagatggaaaatggagctctctgggcgggaatcggatatgttaccatcggcatgatctggacctttatcacgattaaaacgggcagtctggagatgtcccttggcggtcacgctgccaataatatgtttttatttatctttctcacagaggatcattcggtatacggcggcattccgtcgatatttacaacagcagccggcggctatgaaatatacgattgcatatcgactctggtgatcaacatcatcttcgcatggctcgcattccgttttgtgaaaaaagaaaagcagcaggccgcctaggctctgctgctgatttgtaaggtgttcatcgcttcatcaatatccgtcgtcggcctccggcaggcgaaattctcacaaatgtagaccgttgtcttcccatcgatcatttgataacccgcggcaaagtcagaaatgccggcaagctcatccggatgttctgcggcgagaatcgtataggcgggagtgaaatgctcctgaagcgcctcaatgaaacgttttctgtccgggtcatctttccttccgaacacaacgatttctttttggggcattgtgtgtgccagtacgctttgcatgaagaaagcgctgctgctcggataggcctctatttcccgtttgaacacggaaaacatcgcttcggctttttcaatcagtgatacatcacccgtcaggcggccgagacgaagcaactgtacggcagccgcgctgtttccggaaggcacggctccgtcataaacctctttttccctgacaagaagagtctcggcatcattccccgtaaagaaaaaacctccgtgccgttcatcccagaacagctccagcatgcttgtacataacgttttcgctttctgcagataagacggatgaaaacccgcttcatacaattcaaggtaagcccagatgagaaaagcgtaatcatcgataaaccctttgtttttcacttcgccctcgcggtatcggaccatgacgcgcccgtccggcatgaggtgacgttcgagaaagcggatcgctgtttccgccatgctgagaaagtcaggctcgtgaaatacctttgcggcttttgccagcccggcaatcatgagcgcgttccatgaggtcagcactttgtcatctgtatgcggatagcttctgttttcacgcgcttccagcaattttgttcttgcctcttcaaggcgttcggccagctcatgtccggtgaggccggtctcttcgaggatggcctcacgccgcgtgaaaatgaggtgcgggatgttttcgccttcaaaattgccttgatctgtgatgttatacaccttgcaataaagcgggccgagttcatcaccgagaagattcatgatttcttttttggaccatatgtaatatttcccctcacggccttcggtatcagcatctaaagctgagaaaaagctgccgtcttcatgcatcatttcccgctgaataaacgttacgatctgcatcgcaatctgtttgtagcgctcattacccgtgacttgataggcttccgtataggcggtcaggagaagggcgttgtcatacagcattttctcaaaatgcggcacgagccattcattatcagtcgagtagcgggcgaatccgaacccgatgtgatcaaaaattccgccgttcgccatgccgtcgagtgtcttggttacgccggccaaagcctgttccttgcccgtatagctgtagtagcgaagcagaaacatgagcatatgcggcatcggaaatttcggagcctggccgaacccgccgtacaccgtgtcaaacccgccggccagctggcgatacgtgtcatgaaccgcctgttcgccaagcatgccctcagccgggtgaatcttgacttcaagatgagcggcggcgttttcggcgatatcctcgacatgctgccggtcattcgcaaacgtttcggacagatgttcaagcacatcaataaagcccggacggttaaatttgctcgtcttcggaaaatacgtccccgcataaaacggcttctgatctggtgtgacgaacacgttcagcggccacccgccctgccccgtcatcagctggcagattctcatatacacggaatccacatcaggccgctcttcacgatcaaccttgatggctatgaatttatcgtttaacataccggcgatctcttcgtcctcaaaggactcgtgagccattacatggcaccaatgacaagtcgaatagccgatgctgacaagaaccggcttgttttcgcgttttgctttttcgaaggcttcttctccccaagggtgccagtttacggggttgtgggcgtgttgaagtaaatatggagatttctcagcgattaatctattgggtgtactgttatttggcattggatcaccttctttcacttttaaattggttgctatttttactttaccataatggagtttagtttataccttattagattaactagattagattttatctactcgtctaaggaacaccagtcattttgcgcacaatttttttgcaaaataaagacttataaacatttgctgtttcttgtaaagtggtaactaataaagaaataatgaaacaaacgatagaggtttagtacaaatttataagacgttgattatttatacaggaggagagaattaacaatggcatatttatatttattgctcgcaatttttggtgaacttattggttcctctatgctcaaggccgcagaaggcttcacgaaactttaccctactattggtgcaattattgcttttataggttcctttttcttcttatcacttgcaatgaagtccatacctttgaataccgcctatgcagtttggtctggtgtagggactattgctactacaataatttcgattttgatttggaaagaaaaaattaacattgccagtgttactgggattgttttgatacttgtaggagttgtaatattaaatctttttggacctggtcatggtgaagcacatagtgttgaaaacgcaagcgcaacaacaaacaatgaaaaaataattgagtagtgaactgtttgatagtgaagtctataaaacctcacttttttatttatagtcatataatatttgaatgtcatcatctttcatgaaaagtaaagtctcttcgtttttaagttgttcaattgcttcattgactgtttgatccaatttagatttgggtctgtccttttcttctctaccgaccaaaaaatcagtggatacatcatataaatcagcgagtttctttaatgtctccggatcgggcgatctataatccctttcgtaattagacaatgtctaccctgttaatccaattttctctgctggcacgtcttgattagagtaaccggatttttttcgagcccattttaatctttggcctaatgtcatttgttatcatccattccacaaagagttgattaattattataatatcagcaattgctgaccctttcataaagtagaacaaaaaggcgaacattaacctttgactctccgaatcggagggttaaacttaatctgtagttttattcattttgttgtctcgtccatactttcgtaaaaattctccgaaggcatcttgaagcacaaaaaagctctgactaattaatttagtcagagcttttttttatgaagtattcccgagtatctgtccttgtttttttaggcaatactacgtccaattctttatttaaccatgcgagcgttttattacgaagataattacgcatctgttcttctgcttcaagcattaccaagttaattgtacaagaagaattgctggattcacaagagttgcatttgtctcgataaagtagaccattgcttacaatatttttacattggaaaatgggttttggtccttcaacagcctctattacatcccaaaaggaaatatcctccggggattttgctaacctatatcctccctttacaccagggacagaatttacaataccagctttagataatttaccgaaaacttttgaaagaaatgtttctgaaagtccttggaactctgcaaggtcccgaatcccgacactttccttggagggaacatctattaaataaaccagacaatgtaaagcatattcaaccccaacactgtactgcatataaactcacctgcttttgattttaaggtttatcacattgtatcttaggagtatttttgatgatagtcaatcttaaaacccttcttcagatactatttgttccgtttgacaaaataaaatacaaggtttatattagtgaccaagttaatcgtcgattaatatagtctttaatataaaatgaaaggagagtttcaaatgagcaaaacacttatcattaacgcacatccaaaagtagatgatacgtcatcatacagtctacgggtaatgaaccactttttagaggcttacaaagaattaattccagagagtgaagagcttgagcaaattaacttatatagtgatgatgtgcctatgattgataaaacagttttaagtgcatgggataaggcagaaaaatgcgaagaactgacaagcgatgaacaaaaagtaacaggacgcatgacagaagtattgaaacaattcaaaagtgcaaaaacgtatgtcattgttttgcctttgcataatttcaatattccatcaaaattaaaagactatatggacaatattatgatcgcacgtgaaacatttagatatactgacactgggtcagtaggtctgcttaaagatggacgaagaatgcttgtcatacaagctagcggatcaatttatacaaatgatgactggtatgaagaagttgaatactcaaataaatatctgaaatcaatgttcaatttcctcggtattgaggattatcaaattatccgagtgcaaggaacagctttactgagtccggaggatgttttacaaaaagcaaataaagaagttgaagaagctgcttcaagattggcaggtaaataaggtatagcatgaagatcattgttgctggggggactgcagtaattggtcggtcccttcttcctaaattaatacaaaacggccatcaagtatttgcattgacccgaggtaaccggtcgaacacgttcctcaaaagaataggggtaactcctgtaaaagcagatgcaatggatcgagatgctgttcttaatgcttttaggaaaatttaacctgaggttgttgtccatcagtttacctctttaacaggttacaatcttgaagaaaaagcgagaatcagaattataggtgcgcgaaatactgttgatgcgtgtcatgaaattggagtgaagaggataattgctcaaagtctttcttttgcttatgaacccggattaatacctgccaatgaagacgtccctttagatctcgacgcaccaaatccaaggaaaataaatgtaattggagtggcatcattagaatcagcagttgctgaattacccgatttagtaaacaacattaaaacattgcaagaaaatgggttgaacaatatctcatttgaagtaaatcatgacacgttagagcatctttccagcgtgtttttttatttgtgaaaatgaaaaacctgtcaagaaacaaaagacatacaataatcgcaataaaaacgaaaagaataatttaatcaatagacactttgtacctttttacattttaactttgtcaataaatgttcaatctgccatgtaaattttcaaaattctttacgggagtgggggaatttgcttgcaacaagttttcttgaacaaaggtaacgcccacaaccccgtaaactggcacccttggggagaagaagccttcgaaacccaagtattaaaaaggagaactgcttatgactctattttcagggttaaatgtcatctgctttattgctttttagataagaaataaggatttaaaatctttatctttttatttactgttagataggtgaaacacaccccggcgactgtaaccatcccgcctgtcagtgcaataaacgcaggtacttcacctaaccacacccaagaaatagccaaggctacggctggtgttaaataaagtgaaatggctgcttctgaagcaccgacgagtgaagtgacatacgcaagtgcaaagtaaggcacaaccgttggtaataagcctaagtaaacgacagaccatgtggaattcatcgatgcgtgaacaacttctccccataaccccggaagaaataccagcattggcaatgtcccgccccaaatagtgaatgtaacgaatgggataaatccatatttttttatatagcgggcttgaaaaacgaaataaatactctccgaaaaagctgccagcaagattaacaaaatgccgttcactgaatttgtatagtttcctgccccaaatgaaatgatcgatacacccaataaactaatgatagagccgacccatttataaaaaccgaaatgttcaccaaaaaacagacgggataacattgcagaaaaaataggtgtcatggtcacgagtaagcttgctacccctgcgctgacgtttttttctccgatattcagcaaaatgtgatatagtgcaaaacctaaaaatcctaacgataaaatagcagggatatccttcatgtcaggcaaacgcatatgagtcaaaacagcaaaaaccaccaatgccattgacccaatcaacaagcgaaacaaagcgaggtgttccggcgtgtaactctccaaactcgcgcgaattcccgggaaagctgatgcccacaacccaatcatcagactgtaagctatgccgattcgaactgttttctttctcatctttctcactcctctttacaaaaaccaaccagttatttaatgtttttctatattaataaagatttgatgagatgacttcaaccagttaaatagattttgacccaaccactttaaggaggacccttttaatgagcgctccagaagaaaaaaagatgagaaagcttcctaagtacatacaaatcattcaatttataaaagagaaaataggaaatggagaatggccgatcggaagtaagattccaagccagcgcacgcttgccaaacactttgaggtgaacaggagcacagtcattacagctttagaggaattgacggcggatggattaatcgaaggcagaatgggcaaagggacagttgttacgaacaatacatggacacttttggctaagaattccgctcccgattgggatcagtatgtaacctccggaattcagcagccaagccaaaaaatcgttcaagagatcaataaatcagaatcaaattctgatcttatacagctcagtaaaggagaactttcacatgagatttttcctttagctgttatgaaagagatcatgggaaaggtatcccaaaacatagaggcattcggatatgaggaaccaaaaggatatttgcctttgagagaggcattaagcggctatttaagaacaatcggcattcaagcttctccttcttccattcttattgtttcgggcgcactgcaagccttacagcttatatcaatggggcttttacaaaggggatcgaccgtttatcttgatcagccttcctatctttattcattacacgtatttcaatcagccggtatgaagctgactggagttcctatggatcatgatggacttttgccggaacatatccgcatggcaaggggagaacgggggagggctatcttatatacaaatccttgttttcataatccgacaggtattttaatgtcaaaaaagagacgagaagaaatccttgcggcaagtgagaatacacagcttcccattattgaagatgacatttatcgtgagttatggatagatgagattcccccggatcctattaaaacaatagataaaaatgggcatgtgctttacataggcagtttatcgaaaacattaagtccgggcttgaggattggctggattgtcgggccggaaccagtgattgaacgtttatccgacataaaaatgcaaacagattacggctccagttcgttatcccagagagtagcggcagagtggtttatatccggtgaataccagcagcatctagaacaggtgagaagtcaattaaaggtgagaagagaattggccttgagtgttttagaaactcatttgaaagatgtggcgacatggaatatcccaaagggaggattctttgtctgggtaaaaatattgccttccatatccgtgaaattactttataccaaagccttatcaaaagggattctgctcaatctcggcaggatctatgctgaggaaaaagggagttatattcgcttatcatatgcttatgcatctcttgaagaccttcaaaagggaatttatgaattgggtttgatgattaaggaattggcaagcagataaatttatcataattactttaatagaaagagacatgacaccaatgacacgcggattgttcgctgactacggttggggtgctggttaaaaaatacttaggagaacttgatattcaaagagctgtaagagagagattatctttaaaaccgtcactagcagaagtcttcaaaattatttaagttaatataccggtctttattgagatttgttttaaatatgcatttgaaggtcaattttatgatgactaagaactaagaattacactactttataaccgtaatttattaatgaaatatttcctgaaaaactttgatttttaattgcagattgatataataggtttgttattcttggccaaggatgagaatatttacaaatcttcaaaaagtggtgttagcaattaaaaaacctcatattttattatttatattaatttttacattaggtttttttgcgtgctttttattcatttttaagcatatagagagaaatgaaacagaaaaaattaatcataaccgtgtacaagaagtaccatggggagtgaaaaaaatcaatgctgcttcaatatggactttaagagagaaacagaaagtgaaagttgctatattagacagtggtattgataaagagcataaagatttaaaagggaaaattaaaggggaatttaatccaataaacatgactttaacctcagatgatgatgtggggcatggaactgctattgcaggcattatagcagctaaagataatagctttggattagttggaattgctccagacactgagatatattcagttaaagtactaaattcagaaggaaaaggttcgctagatacccttgttaaaggtatagagtggtgtattgataataatattcaggtaataaatttgagttttggattaaccaaagataaaccgttgttaagaggtgcaattgataaagcagtaaacagtgggatcataatcgttgcagccgcaggtaacaattatggcggggatgttgattatccagcagcttatgaaaaagttctctctattaatgctgtagatagaaataataaactagctaacttttcacctaaaggaaagattgacttttctgcacctggtgtagatataccgatactatccctcaataatggatataaaactgaaagtggtacatctttagcagctgcacatgttaccggagtaatatcattaattttacaaaatagagataaattcggaattgattcaaaagaggatatttataatcaagttaaccgtgtattgtccaaattgtccatcgatcttggaaagaaagggagagatgaaatttatggaaaaggatttttatcttttaagtaaaggggctaatttcaatgaaatgttttaaaaagagtattgctgtttttttaagtctaatattaacttttacttttattttacataatgaatcaaaagctgaggctataaacaataggtattaccaaattgtaacaaatgatgaagagaaattagtaatcacagcagaaaaaggcggagttaaaggtttaatgactttagataaagaaaatatgaaactttcattaataaccgatgaaacttctcagaagactggagaaaaaggtaaagaatataaagttgatattgaaaatgctacaaatgagaagatagaagcaacttttactgatacggaaacaaataaaaagtatgagattaattcagatgaggtaacagcttcttttgtttggtttatacctataggaatagttattggagaggcacttttagcgcatttaatttcaattggattagctgtgactatttcaggagtgacttatgttgcctattctgagtttaagaagcgtaaaagaacctattctcattatatggcagtaagaaagtctaaaggattatttatcggtaatggtttgaaaagacctgctgcaattgcacgccttaaaaggggtgatgacacttggtctacgtcgaagaacaatgccaaatctattgctaaagccgcaagtccgattaaaaaaattgttggtccggagatagataaaaagggtaaaggtaaacattatcattatcactcgatctctaggtataaacatggaaaaggtgtccgtatgaaagctcatgctttctatggggcagcaagataatttagattaatttataaacacctaactttaaagtaattaaaagataggaaattataataggagaaggaggtaactatgttaattattgatcacaacccaaaggatcagctgtattcagagttaattgatttggctttcgagatttgcgacgaatttcatttagttttaagaaaagatatgggatctttaaaatcattcgatcctctgttaaaaaaacttgaaagttcgttaaaagtaatgaaagagcaatcagaatgggccagtaccattctaggagacaatcaaaaagcaaaagtttattactattatacagatgaaaacgcaaaaaacattctgaaagaatccgcaaattctttatattcttgggagcagccacatttaccagaagacttgtctttttttaaagatggaaaggagtggttggtaacatgctctcatgaagaagaaagttatatcgatactgaagatgataaagaaatacaaagaatattgagtataccaggattaaaagtgcattttgaaagatgggattaaaatcattcaattttttataaaaaaattgaatgattttagtgaataatatatataagtaaggaaaccgtatagaatggtttccttacttattaaaccaacattactcaattgggatttttcttgtttatttcttgactaatacatattgtttatcttccaaatagaatatatgactaaggtgatttatatctttaaactttatatgttttccaaattgtaaagtatttaaattgataactacacccatgctttcatctttatcttcatcttcatatccatctaagcaggaatatatttcaattgattcaccttttgacaagtgtttttcaatgaaaagaaaaagtgatttaatagatttacgttggccaggtgtattgttggcatgtaagtacccttgtaattcatatatataaggatgtgtgaatttgtttctgactgcttcatatccaggatctaaatgaacaatatcaattccgtatgcatcttcttctgtgtcataaacctttacaagtgaattttcactgttctttcgattgtttttaaattgagagcgtttgttgacatctccttttatttttagttcagaaatgggcttaagtgtaggattactgccatactcaccaataggaagttctttatccgccccaataaaatgatgtaaagtcaatctatttcctcctttatcttatacaactaaaaatactcaatctgactttggataatgagatcttttttgtgtgtctatgataccccgtgtttcttgcctcatcaaggcttgataatgtttgaaggctgaagatggatgatgtgactgatttttaggctccttagggaaagaggaaccgaattaatttaatttaattgttatattgttgacgcatactccatcaatgtccatttagatggtatttttacagctgcagatttttcttcgactatttctaatgttctttcaagttgattatatatgtatccggaaaattaagtataccgtttgaccaatttcagcgttatgaagatttcgttgccagaataccaacaattgaagataaattgaagcagaatagtattaattctaaaaagtgcgggcgcattatggggagaggggaatcttacacacttatctgcagcttcacccacatactttgtgaaagctccaacagcttcttcgcattctgcaagacaacaactattccgttgctttttaacattttcacattacaggattcaggataaaaaagccgccaacagggcggcttttcttaagttaatataccaaatatatatcaaacttcaatctgtatagctatgtctttcctaaaaaaccatcggcttggttcttgaagagtaaatcatttaacccaaagcactattactcctgcagatgaaatttagattattgggctgtatagccgccatccattacgacggcctgccctgtaactccattagctttgtcactggcgaggaatactgcgtaatcagcgatttcttgcacggctaacaaacgtttttgaggaaccaaggggtaaatgacttcttcaaacaccttttctatagaaatgcctctagtctctgcaatatcttgtaactggttttgtaccaatggagtgtcgatatatcccggacacaaggcattgacagtaattccgtattccgctccttctaatgctgatactttagttaaaccgatcaaaccgtgtttagcgctgcaataagctgctttccctgcaaaaccaattaaaccatttatggaagccatattgatgatgcggccaaatttttgttttttcatcaaagggaacgctctttttgtcgcactaaaaggagcagtaatcattaatttcagcataaattcaaatttatcagtcgggaagttttctatatcagacacatgctgaatccccgcattgtttaccagaatatccattcgcccaaaggtttcaagtgtcttagagaaacttttttcaacttgttcttcgtttgttacatcacaaaccgcaggcaggacttcatatccttgtcccttaagttcctcagctgcatgatgcacggctttttcgttcaaatcggaaattaccacttttgcgccttctttagcgaattcacgtgcaatttctaaaccaattccgctagccgcgcctgtcacaagagcaactttactttctaataatttactcatagtaacccctccaggaaacattttggtctcctaaaagtttacacccggcagttgtataagtaaaatgaataaaaagaatataatgtattcgttaaactcatgaaatggagatcatacgatggatatacgccaaatcacatactttcttgaagttgctaaatccaacagttttactaaggcatcagaaaatctgcatttgtcacagcctgccttaagtaagatggttaaaagtttggaagaggaattaaaggttgatctcattgatcgatccgctagacaaatcgctttgacagatgcgggcgaaattgtatttgagcaaggccaaatgattatgaagtcattagatgacttgtcgacgaacttatacgatcttttgcatttaaaaaaaggaaaagtgaaaattggaataccgccgctgatcggtgtcttgttttttcctaaaatcattagagggtttaaacaattgtatcctgatgtgaacatcaagctgatagaacatggaggaaacaaggtgaaaaaggaggttgaagatggagtactggatcttggcgtggttattgaaccagtggacaaagagcagtttgatatcattccattgcttaatgaagaactgatgctcttcgttcattccgctcacccgcttgttcataaagagattgtggaaatgcaagacttgaaaaatgaacctttcatcctgtttagtgaagacttttctcttcacgatcggattattcaggagtgtattagagccggttttcgtccaaatattgtttatgaaagttctcaatgggattttatcagcgaaatgattggagaagaactaggtatttccattttccctcagtcgatagtgaaaaagactgatcaaagtttagttaaggcaatctccattgtcaatccatccattccttggaaagtggcgattattttaaaaaaaggaaaatacgtttcacacgcagtacgcgaatttatccggtatatttcatctttttgtaagagtaattacgtagactaagatcactcatgaaaaaaatgaatggtttttatagtttttatgtattttacggttagagagggctgcgatatattatcttatgtcaggaaataagtacctttcaggaggaatttcaaatggatcaaagccgttaccagcaaggtttagacaaattaatggagtacactttaacaaacgatgataaaatttctacgcatttaaagatttctgaagacttgaaagatatcgctccagatgtaagtaagtacattatagaatttgcttacggagatatatattcacgaccgggattaaccaatcaacaacgtgcgcttgttaccatttcatcccttgtaacgcaaggaaccgagccgcagcttgaacttcatatcaatacagggcttacatccggattaacaccgactgagattgtagagagtatcacccaattggttccttatacaggcttcccgcgtgtacttaatgctctttcagtagctaagaaggtgtttgcacagcggcatgtagaaagccattgagaaataaagagcttgtatggaatgcgggatgaagtagtataaactcatcaatagaatatacacaaaacgacagcctataaggctgtttttaacacaaatgtctgacctcttttttgttttcggctgatcatatgtaaaagcgattatatgaatcgctttttgatacttagaaacatgctaaccttcgacctctttatcagtaagcacttttaaagcatttcttacttttaaggcgaagttgacaggtttatcaatcgcttcgaaatgaatatacatcagtctcggtttgtcaaacagccagtgattgtgtagagacgttacaatcagatcatgtttccgaagagcgctgataaatggattgatttctttttgcagaattacagtttctccgctgcaaagagcacggccgtcttttgtcattgattcaaatgaaaacatttgcggaatgagcaaaaatgatcttccgggccgtcccagtacaaccggttttatattcgttcgtgatctcattactgtacaaattccattttcaaacgtatgcatggttccgcccagaatatcgttgaattcgtcacaaagaccatgccgttcaatcatttccccgtcagtttttggtaccgcacgcacagttttagtagtcagaactcttagggcctctcttacttttcttgcaaaattgagaggtttgtcaattgattcaaaatgcataaacatcagacgcggtttatcaaacagccaatggttatgaacggcagttacgatgataccgaatttgcgcagttcactcattaatgggttcacttcttcttgcagtaaaacagtctcacctaaacataaggctctgccttccgagtccatgctctcaaatgaaaaggcctgaggaataaaaggaaatgcctcggctcttcttccgagtaccaccgggtgaatgttgcttcgaaatcttgtcgccgtacatacgccatttacgacactgggcgttgaattgagaattcttgcaaattctttgcagagtcgtgatggctccatactcgtttcttccacttcatatctcctcctgaaatcaatttaaacgtacttaatagtaaagatatgtgaagatagaaaaaatgtaacgcggcaggagtccataatagagagaatcagcttttttcaccatctcttcaactgttaattattaatagattttaatcggactatttaagatgtgataaaagccttccggatgtgtttgtccattcagtttacattgggtgatgcctttttcttttaccatgttttctcattcgcttatgattactttgcccaacccgtatttgcggtaaggcttcaggatgcagattcgttcgagcttgcctgtttggtttacgatgcggatccgtcctgtgccggcaggctgattctcatgataaaccaagacatgcccgcactgttccccaagcgtatcgaactgatcaaattcatcggattcaggtacttgctgttcctcaatgaatactgcttttctaatctcaagcgctgcttgtaaatcaatttctgttgtatcctcatgatcaaccaacccttttcacatattagtctggactgcacggcttgcttgtggtcttatagaagtaacgacgaaacatttatattgcaagtgcaacaaaaatatgaagggtttgaaaagatatgactgatattttgcgtgaaatcggcatgatcgcacgggcattggattccatcagcaatattgaatttaaagaattagacttaacaaaagggcagtatctctatcttgtgcgtatatgtgaaaacccgggagtgatacaggaaaaactggcggaaatgattaaagttgaccgaacaacagcggcgagagcgatcaaaaaactggaaatacaaggatttgttgaaaagcgtcctgatgatcaaaataaaaaaataaaaaaactgttcccgaccgaaaaagggagaaaggtttatccgttattgcaaagagaaggagagcactctgcggaagtagcactgtccggctttacgtctgaggaaaaagaaaccattttcagccttcttcagcgggtgagaaaaaatatagagcatgattgggaatatgtgaagaagggaaacaaaagagactattaatggatgataattccttttactgaatgattgcgttgtgaatgattaaagtcataaatggatacgttatctgtgaaatctccttcctcggttcctgcttcaactagccgataggcttatttttaacgaaaagtatcaattatggtatatttaaataagacaaaataattgaagcggggaatgatatgagtacaatcgaaaaacaaagacgtaagaaattcagagccaaatcaatcgtacgggtcatcatggtcatcatcggcggaattattgccgcgtatggactggaaaccgtactgattccgaatagtgtatctgacggcggtgtaaccgggctcagcattgtcggttcacagctgtttcatttgcctcttgggatcttgattgcggtgatcaatataccgtttgtctggttaggatataagcaaatcgggaaaggttttgcgtttctatcaattatcggtattgtctcacttgccgcgggcacgagttttttccaccacacgccggctatcattgagggagataccctgttaatcaccgttgtcggcgggattattctcggcttgggaatgggattggcattgcgcaacggcggcgccttagatggaattgatatgctggctgtgcttctgtcacggaaattgccgtttggcacgagcgatctcattttatttttaaacatttttgtgtttatttttgtttcttttgtattcgggctgcaaggcgcattgctttccgtcattgcttactacatcgcatccaaggtgatccatgtggttgaggaaggcttaagcggttctaaaacatttcagattatcaccaacgagcctgcattaatggtagagaccattcgtgaagaattgggccggagcgctacgtataaagaagcatacggcggtttttctcatgaaaaattcaaagaaatcacatgtgtcatcaaccgtttggaagaaaccaaactgaaggaaattattaatgacattgataatcaagcctttgtgacggtatatgatgtcgctgaagtaaaaggcagtaatttcagaaaaatccataatcattaagaaggagctgccgttcaccggcagctttttttaaaaaggagaaaacacttgcaaaaaaagaataacggatgtatattattgatatatcaaacattgactagtcaattaattgcgcaaaagaaagtagggatgggttttgacagcatgttgttcagaggaaggcgagattttgtatcagctccaatcactgcacaaagtgatcggcacgaagtttgaagcgtgcaccggaatcagccaatcccgccttgagcttctcgccgtgcttttttacgtcgatgagatcagccaaagcgatcttcagaaaaaggtgaatattgacggcgcagctgtgacaagacacttgaaacagcttgaagccaaagaaatggtcacaagaaggcggaagcctgaggacaaccgaattatacttgtccggcttactgatcaggggcgggagagaattgaggcttccaaaaaggagaaggagcgtttcataaaggaaatgcttgccggtgtcagcgaggaagaacgcagtatgttaaaaaacgtattgtcgcagatgcagaataatatagaaaatatgaaagcataggagtgtattacacatgaaaacagaactgaaaacaaacgattttatggacattatgaaaggccgccgttccattcggaattacgatccggctgtaaaaatcagcaaagaagaaatgactcaaatattggaagaagcaacgacagcgccgtcttcagttaacgcgcagccatggcgtttcctcgtcattgacagccctgaaggaaaagaaaaactcgcgccgcttgccagctttaaccaaacacaggtcagcacatcatctgcggtgatcgcggttttcgcagatatgaacagtgatgactatttagaagaaatttattcaaaagcggtcgagctgggctacatgccgcaggaagtaaaagacagacaaatcgctgcgttgacggcgcattttgaaaaactgccggagcaagtgaaccgtgaaacgattctgatcgacggaggtcttgtttccatgcagctgatgcttacggcacgcgcgcacggctatgatacaaacccgatcggcggctatgataaagaaaagattgccgaggttttcggaatggataaagagcgttatgtaccggtcatgctgttatcaatcggaaaagcggcagacgaaggatatgcttcctaccgtcttcctatcgaaacaatcgcacaatggaaataaggttgaagtgaagctgagaggagagggacagtggacataattgcggctgttttcgtcggaattgtagctttagaacatatatttatcatgatacttgaaatgttttttatcaattcgaaggctgccaagcggtctttcaaattgccgaagcatttagaaggcgatcggaatgtggcggtcatgtttgcaaatcaaggtctgtataatggatttctggctgccggcctcatttggggactgatcctcggagctgatccgattggccatatgattcaaatgtttttcgtcatctgtgtggtcatcgcggccattttcggaggctttacttcaaacaaatcaattatcgtaaaacaaggacttccggctgttttagcgcttatttttcttttattggcgtagcagacggagtgagtgagggcttccggaaaggaagccctctttttttattctgttttgaaaatcatttcttatatacatcactatagattggggatgtcaaatcagctgtcaccccttcttaattgttatttgctgaaagtcttctatctgctaataaagcctaatagatggagtggactccatgtcaatctgtttttttaaaaaaagctgatcggtaaatatggtatgatttacataatcagggagtggggttgcagaggatgaatatgaagagagcgtattacgctattttatacagccagaccgctatcaacttggggttttcactttatacgatggccgtcatcttgtttttgtttacaaaaaccggttcgacggcgatggcctctcttatgacgctcgtcagcattgtatgccgcgtattgggcagcgccgttttgccgctggtcaccggtcggttcacgcttcgttctttgttaatcagttctcaattgatacagatcacactgttagtctgtttgttttttgtcatccaaaccggttcatccgcattcttttttctgctgttttgtctgatcggaggcatttctttttgcaacggatggtttgctccgataaaaagcgcgctgattggggaaatcattcctcctgatcgaagggcgaaagcgaacagtttattatcggcggcggatcagaccgttcagtttgcggggtggtctctgggcggcgtcatcatagcgttcctgggagagagcgatacaatgatcgtcactgtcatgttattggtttcttcggtgttgggcatcattctgtttcttcaagtacgcatgtgtgcgccggcagcagtcagggaacgttccctttttgcagatgcggcaagcggctgggtgtatttatttcagcaaaaacagctcaaggttctcattgtgatggatgtgatcgaatcgtgggcaggcatgatatggatcgggtctgtgtccttaacttatgtgcatgacgtccttcataaaggagaggcttggtgggggtatgtcaacggagtctattatgcagggacgatgatcggcggactgatcatctataagttatccggtaagcttcagcatcatctcattccgcttatgctgacgggagccttggcatatggaatgttcacgtttatttacgggctgatcacaagcgccgttacggccctttttctggtgctgtgtatggggccggcttgtgtattacgagatctcacgcaggaaacattacttcaaaatatcacgaccgaaaagacacgggtcaatatattagcggcgagatcagctttagttcagttcatttttatgttttccattatcggaacggggattatctcggatgtattcggcgtgcggtttatttatattggcgcaggccttctcttattaatttcggcttttatcggattttctcagctgcgaatgaagaaaatggtacagagcggcatgtagtgtagtataattaggaacgtacgttctatatcgagagaggagagggtaatgtgggacatctggcactgcaattgtatgattatcatctttgggcaaatcagcaaatattcacccggcttaaagagcttccggaggatgtgtaccgtaaggagattcaaagtgtctttccgtcgatagccggtgtattgactcatgtgtatctgtcggataaggggtggtttgatgtgttctccggagagcgtctggaggatacgctgaaatcagctgaacagcaaaaagaggacatcttgtctaaagagatagaagagctggaagatctatttttgaaattatcagaccggtatcaactatttttgcagaaggaggaaaatatcagcctcccccttgaaatagagcatccgtcaggtgacatcatgaaaaccgcagcggccgatatgatcctccatgttgtgaaccacggaacgtatcatcgcgggaatataacagccatgctcagacagatggggtatgcttctgtgccgacggattacggtatttatttatatataaacaaaaagtaaacaagacaggcaacgcggctgtcttgtgatatccgtaaaaaagccaaatcatatgagtgatttggctttttcgtttgctatgccatgttttgcagccgttctaaactgtttttccaattcgcttcaagcgctgtaaaagcagcggcggcatcttgctgttctaatgcgtgaatgatatcagagtgttcattatatgatctgtttaaagcgccgttttcactgaaatagcggatttccagtctctgaattttgactttcaggcttactagcaatttgtgaagttcagcgttgtccgcaagcagaatgatgcgatggtgaaatgcattatccgcttccagaacggccattttatcgccgtctttcatcgtttgaagaagattttcattcagctgtttcaattcttgaatcacggcatcgtccatacgcgggagggcttgctgcaatgcgagtttctcaagcgtccagacgatggaatacaagttttccgcttcttttaactcaatcggagcgacaagtgtccatctgttcgcttttgttatcaccaagccgtcatcttccagccgcaataaggcttcccgtatcggggtgcggctgattcccaatgtttccgacaaatccttgtcctttaactttgtttccggtttgagcttgcccgttatgatccagtttctgagtgtgcgatacacttcgtcccgcatgatggttcttttcagcacaggttctttgttttgattatccaatggaacacctcatgaatcgtagtatacatatttgcattttaccacagtccgggcgccggttagaaatgaagagggacgtctaagaatgaatcgaaccgagatgcttcatctcaatatgctgaaagtcagcggagccgccttcagaaaagagcgtgattccctgatcttcgtgttttgggaacacttcatttgtcaaaacggtttttccgtcgtctgcaaatacttcaatacttgttttatccacgagaattttcagatgaacgcgccctttgtttccgtcaaatggggctttgctttcggtgtatgcaccggttttatcaggctggtctgtaaacgatctgttcacataggcacaaccgtcttctgctgaaataccgacatcaatatgccggctttggtctgctgattctctgagtctgacgcctgcatttttgatatctgaccaagcgatatccatatcaagctgatatgtatcacctttgatcggcagtgtctctgaaccgttcacctgtttgtgttctatgctgtcagttgaagaagttaattggttcaatgcttcaaccggctctgacacaaggctgtatgtgccgccgtcctgctgctgaagacggatttcacggacgatagaatccgtgccgttaaagccgttttttagtgtcggtgtttcattcggataatcccaattgttcatccatgccagcgcatagcgttttgtcagcggatcttcgctattaccgtcttcaaatgtgacgccgccgtaccagtcaaagccgtaatcaagccattgcggttcttcttgatcggcggtaaattccttcccgtcaaagtttccggtccaatacgcgtacgtattcggtttgcctgcgggtttgccgtttgcgcttgcgcccagaacccacttggctgtgccgtcatctgcacgcatcatataaaggtcggggcattcgatgaggccgatctgctgagtgataaaaccgcccgtgtatttccaattttttaaatcgggtgattcataaaaaccgattttttctccttcggccatggccatcacccatttgtcatcctgttcatcccagatcactttcgggtcccggaaatccttagttcccgggtttttcataacgggctgatcactataggaagtaaacgtttttcctttatccgtgctgtaccataaatattgttcctgggcttttgttttggctgtcggctgcgttgtgacggcgaccagcgcgtttttgccgaagcccgcggtgttgtgtttatcaatgacgacagaaccggaccagatatcgccgttttcgttggtgtatttcggaatagccgtgccttcgtccgtccagtgcaccaagtcctttgatacggcgtgccgccattctgtgccgttgccgttcgggtaatcccgattataaagatagtagtaatgatatttcccctcgaaaaaaataggcttttgagggtcgtttttccatttgtccggagtcgtaaaatgatacgccgcccggtaatccttcttatgctccgtgttgtttgtgtcagaggaattgtggtttttgttcggcagtaagccgacaaacaggaacgcacccaaaaagatcaatattacaacgggccattttcgtgccatgattgaattcaccatcttattgagaaataaaagaaaatgccaatgaagtatcggcattttctttttgttgttattagttgttaaccgtaagctgtccttgttcaaggatgctgtttttaacaacggatgttttcttgcctttgatgttcattaagaagcttggcgcaaatgtcgcctttttatcctcaaagaagcctctgtttgtcatgtagcttgtgatcacgacattgttgcctttggcttgcggcactgcgaagtgagagtaagtgaacgttacgtcgttaggatcaagacccatttgcaggacaagaccagttttgttcagcggcttgtaaggacctgttaaagagtttgatacataaccaagcatgtaaatatcgtttgagttaataccgtcgatcgtcatttttgaaccgcgtgaatcagtgaacaggtaccatttgccgttcattttgaaaacattcgcgcgctcgatttcatcagttaccgtgtttgaagtgatcagcggcttcatgacttttttcaatgtgtaatcatcgtttaactctaccataccgagggcgccgttcgctaattcagcatcgcgttttttagcgctttgctgaagcttctgactttctttacggaagaagtttgtgctgccgccgtagtacgctttgttaaataaagattcttcgccttggtatccgttttctgttcccgtgttggcttcgaatacaaggtatttatgtcctttgtcttcaacgtagtgagggtctctcagcgtatggttgtcgccggatgtatagttcccttcatcgataaactgctgaacgttttgatatgtttttccgtcgccgtcaaaaatcgttttatgatcttcaactccgttgatcttgagcgtgtcatcagattttgacacatttacctgcgccgttgtcaggctttgtttgccgtaatgtttaccggaaaagtcagtgtagaataaacggatttttccgtcagatgtaaaggttgcagaaccggaccattcttgtgtctgttctttcaggatttcatcgttggcgtcgaacttatcgctgtctttaaagacacggcccgcgtttttccagctgtcgatcgagttgtcgccgactttttgataaaacatgtagatggatgtgtcatcagcgtctttcgggcttccggcaagagcaaacacgacgtgatagccgttgtattcagctactgttccgtcagcgttttggagcggccagctgtcccacacatccagtcctttcgcggactcgatatttttaattgttgatgggtcgaattgaggcacttggtatttttcactttgctgctgtttagggatctgcagcatatcatggcgtgtgatatgagagacgccgtacgtttctttgtaaggtttttgggtattttctttcgcgaaggcttgagtcgctccccctgccagaagtgcagtcgtaaaagttagaactgtggctcgttttgcaaattttttgatgttcatgttcatgtctccttttgtatgtacctttttttgcgatctgccgattcgatcctcctgcattcatggatgacaggtttgttacagaaaaaaagacctaaaatatgtatggggtgacgccaaagaatacactttgcccttaacacattttaggtcttgcctgctttatcagtaacaatcctgcatgatttacttgtcgacatcattctattagactctgattctattgacaactggtctattttcctcttttggatgatagtaaaatgaaaaaaggccttttaatatatgggtaattgagcctaaggggtgctctggccctaggaaaaaacctctctaaaaaagagaggttattttttcttgatagataataaagcgatggtggttaaaatcagcaaagtacccagccattctgatattccgaagggaacatgcagccagataacagttaaaaaagctgccgacagcggctctgcacaggcgagcaggctggtttcagaggcactcagatatttcaggctttccaagtagcaataaaaagcgatgagcgttccgaaaatgatgataaacacaatcgcggcatatgcaggaaaggaccactcgccttcaaatgtccagggcgggcggatcaagctgagggcggctccgccgatcagcatgccccatcctacaacaatggcggatccccatttcttcagcagacgatgcggctgaagggtgtaaaacgccagtgcaaacgccgaactgattccccaaaagacggccagaccggatatggacaggcttccgacattcccgtgcgtgaccaaaatgaatgtgccggcaaccgccaataagacggcgagcagctcttttcctgaaggaattctctttgcgcgaatcgctaaaaagcatgtaatgatcgccggtcctaaatactgaagaacggtagctgttgccgcgttgccatgctcaattgccgcgaagtaggtgtattgaacacctaacattccgaaaatcccgaataaaagaaggggaattctgtcccgtctgtctttccaaacagcccatatccgtcctttttctttgcggtacgcgattccgagcagaagcgcccctgacaccagaaggcgcaccgaagtcagccattctgtattaaaatggcggtgctggaacagatactgggcaaccgttcccgagaccccccataagatagctcctgtaagcacaagccaaatgcctgttgttcgtgaataagaaagagcagcgtgtttttccaggatagacacccccgattctgatgttgcgacagcaacttacaataattagaaaaatgaacgccttacatgtgatatattatatattgtatattaataggcgtcaaaataattttagagtaagcgcttacgaaacggccgtctgatgaacgagctgtaaaaaaaacaccccggctggttgccggggtgttttggttattctgcaatcgcgtctgttaaaacaggaacgacttgtttctttctggatacgacgccttttaaaagggccgtgttgttttctaacgtcacgttgaatgctttttccacttttgacgcttgatcaccgatggcaagcgcaagggaatcattttccagaatatccgtaatcacgagaaggaacaggtcaaggttcttctcggcaattacttttgaaagagccgcttctaattccggctgccgctttttgacatcttcaatatcaactgtgttgacttgggcgatttcgacttttttgctgccgagcgtgaactctttcgcatcaagagaaatcagttcttccacagtttttttgcttaagtcggcgcccgctttcagcatgtttaagccgtactcttccgcatctacgccggcaatttcagcaagctcttttgccgctgcgatatcttgctccgtgcaagtcggagatttaaataacagagagtcggaaatgattgctgacagcatgaggcccgcaatttctttctcgattttcacgttattttctttgtacattttgtttaagatcgtagccgtacagccgaccggctcagcacggtagtaaagaggttccgctgtttcgaagttggcgatacggtggtggtcgatcacttcaagaacctgaacgtcttcgatatctttgatgctttgctggcgttcattgtggtcaacaaggatgacgccgtttacttcgtttgcggctgtttccaccaaacgcgggctttcctgcttgaaataatcaagcgcgtattgtgtttcgccgttgacttgtccaaggcggacgggctcagcattgaagccgagtttattttttagatcagcgtaggcaatggcagagcaaatggtatctgtgtctgggttttgatgtccgaaaataagaattttttccataataactccttgtccttttttgtagtgtaaacaatctttttatagtttaacacgtcttgcggagggtgtaatcttcaaaaccttaaaaattgatgtgaaaaagaagcatttttgttgagcggtgaggaggattgcgagtaaaatactgggtaagtcagatgctaatcagcatatagtatcaaaaaaggtactatggaggatgaaaaatgaacatatatccgaataaagaaggttgtccggttgaactgacgctttccgttatcggcggaaagtggaagggtattttgttttatcatatgatcggcggaaaaaagcggtttaatgagtttcggcgcatttgccccagcattacgcagcgtatgctgacgcttcagcttcgcgagcttgaggcggacggcatcgtgcatcgcgaggtatatcagcaggtgcctccaaaggtggagtattctcttaccgaattcggcaggtcgctggaaccgatcgttttgcaaatgaagaaatggggagatgccaaccgggagtttctcgagacataccgggaaaaaacgtcgcctcaagatcagtccgctcaaaaataagaagcagcaaaggattaaattccttgctgcttttttttatttcatcgcgatggcttttctggcgttgcgcacatcattcttcagcaattcgctcaggttgtaagccggatattgaccgcgttcttccatatactcaaagaccatttgatgccacttgatggccgcgtttaagtgcttgacgaaaacgtgtctcaattggggtgtggccgtctctgtaatggctccggcgtaattgcgcacagacgttttggccatgctcagcagaccgccgctgtaaaacgcggaatcagcgcgctcttctgtttcatcctcacgaaaagcgggagcttcagggaagaaaggaagcagttcacgcagattttgttccagcgaatggatggaaaatcggtaaagctgttttaatctggcatcgcttacgtcccgctctgttctttttaatttcacaagtccgtttgcctggaaagccactaactcatgcagttctaacgtttcatgccatgctaatgttctccgctcggtcatagtgtaagaatctcctttatccttcattttcactttcagcatatgccccggtcccgatgttgttcctgatgttttgaagtttccagaaagggaaactcaatgtaaaggaaatacgaaatagaggtgaaactatatgtgggacatgataaagaacttcttccttttcagcagcggggttttacaggcgaccactctcttacttatcgttatcgtcttgttatatgtacgaaaaaccaaaaagaaaaacagagaaacttctggttttatggatgatcaggatcactgatacaacgggcattctttcacggggatgtccgtttgtctgttttcatgtttcacatggaacattgcggctgtccgcgctcattttacttgcgatttcgacttatgttaaaatatatacgtgtattttggagagtttatggaaaattcaggtcttgaaagagacattgcggcgtcaaaagagcagtcgtctaagctgctcttttctattcgtatgttcgaatgatacaaggtttgaggtgagtaagtgaaaaatacaagggctctaatagaaggcgccattttgatcagtatttttgcaatcatttcccttttggtcgtgtacctccctttactgggggcaattcttctctttgctttgccgctgccgatcattctttacaccattcggcacggtctgaagcccggggtatggatggggcttgccagccttcctgtcagctttattgtaggttcgtttaccgggcttacaggcgcttttacggcggcctgtacgggaatcgccatgggatattattttaaaaagaaacagcccggctatgcggttgctgccggcgctatggcgtatgtgctgtgcggcgtcgttttttttgtggtcagcatcgtgtttcttaatatgaatgtgatcgataccaccatgtcccagcttcgggagtcgatgtctttagcagaaaccatgtcaaagcagctcggttacggagatcagttcgggaagcagatcaagctgatggaaagtcagctgagcacggttcaatatctttttccgacagtgctcgtattgaccggcatcgttttttctttcctcagttatgctatggcaaggccgcttttacggcgattttcccctgatcttccgaagatgaagccttttagagagctcaaactcccgcaaagcgttgtcattctgtattttattgtgacgatattagggtttctgcctttagaaaaagggcatatgctgtattcggtttcattgaatgggggatttattctcagcttgctgatttgtattcaagggttagcgtttatttttttctattgccgcgaaatggagatgccgaaagccgttcctgttttagcaattgtgctgggtgtgctttttccgctcatcttgtccgtgtatctcctcttaggcatcattgacataggctttaacataagaaataaggtgacgcgaaattgagtgtgacttacaggtggggagttgatagaaatgcctagtttttatgaaaaaccgttgtttcggtatcccatctatgcattgattgcattgtcaatcatcataatcctcatcagcatttactttaactggctgataggagccatcggcgttgtgctgctcgccgtgatcctgtttttcattaagcgtgcggattctctgatcagaaaagaaattgacgattatatctccacgttatcgtatagattgaaaaaagtaggcgaagaggcattaatggaaatgcctatcgggattatgctgtttaatgatcaatattacattgagtgggcgaatccgtttttgtcttcctgttttaatgaaagtacgctcgtcgggcgctcgctgtatgacacatgcgaggccgtcgtgccgctgatcaagcaggaggtcgattcggaaacgatcaccttgaatgagcggaagtttaaagtagtgattaaaagagatgagcggctgctctatttctttgatgtgacagaacagattcagattgaaaagcagtatgaaaatgagagaaccgtgctggcatatatctttttagataactatgatgacgtcacacaggggctggatgaccaaacgagaagcacgatgaacagccaggtcacctcattattaaatgcgtgggcgcaggagtacggcattttcctgaaacggacgtcctcggagcggtttatcgcggtgttaaatgaacacattttaacggagcttgaaaacgcgaaattttcgattttggatgaaatccgtgaaaaaacatccgttcacactgtatctttgaccctcagcatcgggatcggcgcatcggtttcttccttgaaggagcttggagatctggcgcagtccagcctcgatttggctctcggccgcggaggcgaccaagtggccatcaaaatgccgaacggcaaggtgaaattttacggcggcaaaacaaatccgatggagaaacgcacaagggtgcgcgcccgggtgatttctcacgcgctcaaggagattgtctcagaaagcagcaatgtcattatcatggggcacaaatttcctgatatggacgcagtcggagccgcaatcggaatattgaaggtggcgcaggccaacggcaaagaaggctacatcgtcattgatccgaaccagatcggatcaagcgttcagcgcctgattgaagaaattaaaaaatatgaagagctgtggtcgcggttcatcacaccggaagaggcgatggagatttcaaatgacgacacgctgcttgtcgtcgttgatacacataaaccgtcccttgtgatggaagagcgtctcatgaacaaaatcgagcacatcgttgtgattgaccaccaccgcagaggcgaggaatttattaaagacccgctgctcgtttatatggagccatacgcttcatccaccgcagaactcgtgacggagctgcttgaataccagccgaagcggctcaaaatcaatatgattgaagcgacggccctgttagctggtataatagtggatacgaagagtttttcccttcgcacgggctcgcggacgttcgacgccgcttcttatttgagagcgaaaggcgcagatacggttctggtgcagaaagttctcaaagaatccgtcggttcttatatcaagcgggcgaaactgatccagcatacagctctttataaagaacatatcgcgattgcttctcttcctgagaacgaagaggagtactttgaccaggtgctgattgcgcaggcggctgattccctcttatcgatgagtgaagtggaagcttcatttgcggtagccagacgggatgagcatacggtgtgcatcagtgcgagatcgctgggcgaggtcaatgtgcagattattatggaggcgctggatggcggagggcatttaaccaatgcggcaacccagttatcgggcatttctgtctcagaagcgctcgtccggctgaaggaagccattgatgaatattttgagggaggcgttcagagatgaaggttattttcttacaagatgtaaaaggtaaaggaaaaaaaggcgaaatgaaaaacgtagcagacggttatgcacataactttctcattaaaaaaggcctcgctgtcgaagcaaatgcgacaaacatcagcgcattgaaaggacagaaagaaaaagagaaaaaagaagcgattgccgagcttgaaagagcgaaagatttgaaagaaacgcttgaacagctgactgttgagctgagtgccaaatccggtgaaggcggccgccttttcgggtctgtcacaagcaagcagattgcagaagcgctgcaaaaaacgcataagattaaagtggataaacggaaactggagctccaagacggtatccgcacactgggatatacaaacgttcctgtaaagctgcaccctgaagttcaggctgtgctgaaggttcacgtaaaagaagaagcgtaatacacaatgaaaaacccgccgatccggcgggtttttttcatgtcagcagacggcgcagcgcaagaaaatgatgagattgtttcatttccgatcgttaccagattgcatattatattacatcataacgaaggatgtgtcggtatgaaacgatttttttctgaaacatattttaataatccggagaataaaaaggcgctggagcattatccgctgatcggagacggaaaagacggggaagtctaccgcttaacacacaacaaatgcataaaatacttctttgaaaaagggacatgcaagaaggaattggcggctttaaagaccggacaaggttccccggtgattccaagactgtatgaatacggagatcgttatattgtgatggaatacgtccaaggcacctctcttgcccgccatatcagaaaagaaaaatccctgtccgtcaaaatgactgctgatattttaaatatgctggatgaattaaaaagaatcggttttaccagatgggatgccgaaatcaggcacattctgatcaatgaacacggaaatcttaaagtcatcgaccataaaagagctttttccgctattacccggtttcccgtaaaactattaaaaggactggacaaatacggcttggcggatgagtttttgaatactataaaaaaattaaatccgtcacgttacctggaatggcagccgcacatgtaagtttctgaaaatccgcacatgtaagtttcctttttttagggtcgtcatatgatatttgtaacatttgtttggtggagtgtggaaaaaatggcagaatacattatggttatcggcgctcatcccgatgatgaactattgggagcagcgggcaccataaaacggctgatcaatgaaggatataaagtgatttccattattacggcattaggaagaaaagaagaagctcatcatattaaacaattaggcgaacgcgcgaatcaagagcttggaattgagaaagtcatctttttggagcatacgaatttagagctggaatgtatccctcttcataagcttgtcaaagaattagagcagctcattcgcgtctatcagcctgataaaatctttacacatcattacggcgatatcaatatggaccaccagagaacattccaagcagttttaacagccgccagaccgcttccgaatcaaaaacctatcgaactgcttacgttcgaaacgctatcttcaagcgagtgggagaggaatacggctgataaactcttcaaacctaattacttcgttaacatcacagacacaatggatgctaaactcgcggcgcttcaccactatgacgtagaaatgagggattaccctcatccccgttcatatgaaggcgttaaacatttaggaaaagtcagagggatgacggcgggtgtggaatacgccgaagcttttgaagtcgtgcggaggatctggaaatgatcaagacattttccgtcccgtatccgtatatggtccagacgcttgaccgctactacggggtcaaaacgcgccctcaaaaaaaggcggcagtaaagacacagttgaaacatgaacatcatattccgcggttatacaggaaaaaaaagaagttatccattttgattgccacgttttgggactacccgcacacgggcggtttatcaaactatattaaaacgcttagtgaaggcctgaagaagaggggtcataaggtggatgtcatctcccctaatctgtttccgtccgcacaggtaaaagaactgcgggcggctgttgttccgaagttaaaagatttctttaaggacagatatggggattataacaatcatattttgaaaaataatcggctgatgtttatatacgagcaaatgcttcaaaagattcatttggaaagatatgatgtgtttcatgctcaagatttatttacagccaatatattaggcagattcaatcaaatctataagaaacctttatttttcacaccgcatggcatgtttactttcaacagacttaaatttcacatctttaaaaaaggatcgatagaagagttttattataaaaaactagagatgaaagccattgaatacgcagatcgcctgattattatcagcgatacgttccgcagcccgctcatgaagctcggagccgaacaggaagacatgacaacggtgatcacaggaatcgattacgatgcaaaaacaggcgggaaaagaaaaatcccgctgccgaaaaataagatcatcatctcgtgtattgcaagattaggcccgagaaaaggacataatcatttgcttgacgcactttcacgaattccgtctgatgtacttgagcatgttgaagtgctgatcgcgggcgacggagagatgaggagcgccttagaggaacaggctcgaaaactgaatctatctatggtttcctttttaggaaaaagagatgatgttcccgctattttgaatatgacggacatattcgtactgccgaccgttaatgacagtctgcctatttcgattattgaagcgatgttcagcggctcggctatcatcgcgaccgattgcgggggtattccggatctgatccgccataacaaaacggggcttattgtcgagccgggaaatgcaaaggttcttgcccgggctttagcgttttttatcactaacaaatctgcgcggaagatagctgcttcaaacgcaaaggcctacgcggagaaatatttgagcagtgagacgatgataaaaaatatcgaatcgatttatcaaaataccaacagctcggagggagatcatgaaacatgaacatgcagccgttgtactagatttcagtgcaaacgggattgggatcattcgcagcctggcccgaagaggaatcgatgtttacgcatttgacacggagggaccttatcgtatcggaaaatcaagattggcagattgcgggatatgtcccagccctttaacacaagaggaagaactgctgacattcctgactgatttcgggaagcgattccaagcaaagccggttctgtatgcaggttctgatgattatgcgggatttatatctaaattccgcgagacattagccggtttttttttatttttgctcccgagccgctctctgttagaaacggtcttagataaaagcaaagcatatgaattagcggtcaagcataacatcccctgcccgaaaaccttttttccgaacaaccgggatgagctggaagaggccatcgccaatattgacttcccgtgtattttaaaaccggtggccggccatgaatacagaaaaaaagtaaacaaaaaagcaattgtaatgaaggatgccgcacaattgcgcaaggagttcagctcctacagagaaaatggagaactgctcgtgcaggagatcatccccggagacaaccagtgtttttataaagtcgccactttttatgatgaccaaatgaaattaatgggcttattctctctgcaaaagaaccatcaattccctgctgattttggcgcgggggcccacgtcgtcagcaaacggcttcctgatttaatcgagaagaccctgccgttttttgaagcgattcagctgaagggagtaggcatggcagaatttaaaaaggacccccgggacaatgtttataagtttatcgaaattaatccgcgcttttggctcagccatagcctgacagaaccggcaggcattcatttcgtttacatgtactatctgtatttgaccggacaacatgtgaagccccagctcgaacaaaaagacggaatcaactggatttatgaggtgcgttacttcttaacgtttttgaagaaacgaaaaagaggagaaatgacgttccgggatttttggaaaggatttaaaggaaaaaaagagtacgctctgtttgcttggaatgacccgatgccatttatcagaaacacttggtctcatctcaaaaacagctggaaacggaagcggaaggaagatcggcatgtatgaaaaggatcttttgtatgacgcatttcaaaaactgagaattgacgaaaaactgtcgtattcgttcggtgaaagggccgcggtgaatccggatgacatcacatgcctgaaatcaacagacagaagcgccatttataaactgtttgtaaagaaaaaatccggaattgttccgctgatattgaaggtgtataaatcttcacgtgaaaaaaacaaggtcgagattaatatatacgggaaagcccgttctgttttaggggatttgctgccggacatctatcttatagaggaaagtgaccatgaaacgtggatatttatggagtttgtcagccagatcagaggacagcttacatttcatccgaagcatttcaagtatattattccgtctgtcgcagaactgcacagccgcacctttgaaaacaaggctgtttctgacggtaaatggcggtcgtggctgccgctatacgaatcggaaaccatgagaaaagggcgtaaaaagcagatcaaaaagacagcggaattattggatagagctcttaaagatgagcgcacaaaggatatcgtgaagcctcattatcggcaaatcacaaacttgctggagcaggaggagccgggttttttccctgaattggtccaaaacggctcagccatcacacacggtgatcttcatatgcagaatatctgcacccacgatgcgtccggacatgaaccgtgggatattcaattcatcgattgggaatccgcaaagtacgcgccggtttggtttgatatgacggtgctggtcgaaattctgctcggcttcagaaaagactggagccggcacgcagaagatattcggacgtattgcgtaaaagtgtatacgaaagaaatgaaaaagcggggcattcattttcagacccctcctatgacgctttataaaatggcttatttgcagagaacacttgagaaagggcttcatacccaattgcggagaatcttcgacaatcggggaggagaactgctgccgtatcatgttgacaaagtgtcaaaatggggacgggaattaggattataagtttaagagagggggagcggatttgaaaggagagatcggcaagccgaacggtctggtgcctctaaccttattgcgcgtcatggatcaattttacgggatcgaacatcaaagtgagccggagatgctgtattcgttctgtgcggaaggaaaaagctcccccaaacgaaaaaagccattgcgtattctgtacgcaacctttctccgttacccgaatgtcggaggactggcgagttatatcacgtcaattaagacgggttttgagcgcatcggtcaccaggcggatgtcatctcgccgctccaaatgccgccaactttttttcaggaagatatcccgcgggccgctgacgagatcagagcgtttcttgttggcagatacggggccgcaaacgaaaagtttgtgaagaatctcagctatttacatgtctttcaaagatttttgaaggagaaggacttagaacaatatgacctgtttcacgcgcaggatttatttgcggcatttttgctgggataccttaatcaaacgtatcggcatccgcttttttttacgccgcacggacatttcacgaaaagccggatgaagtttcataaaatccaaaagggttcaatagaagaggcatatttcagtgaaatagaaaggcagggtattcgggcttcggataaaatcattacaatcagcgactcctttcacgagcccttgctggagtacggagcgaaggaggctcagctgacgactgttcataccggcattgacatccgggttgcacccgagccaaaacgtgctgaaaaggtcgtgattgcgtgcgtttcccgtctgaccgagcgaaaaggacatgatgtgctgctggacgctctcgcccgcatccggcaccatttatccggagtggatatatggatcatcggggacggaaacatgagagggtttctggaagagaagagacggaaactgggcctctcaaacgtgtttttcctcggaaaacgacatgatgtgccggcgcttttggctgaatcatctatatttgtcctgccgacattgaatgataatttccccatagcgatcatcgaagcgatgttctcaggtcaagccattgtcgcaactgactgcggaggaatccctgagatgatccggcacgaggacacagggcttatctgtcagcccggcaacagccgcgaacttgctgatgccctcgtaaagctgattacggatcagtctctcagggaacggcttggaaaagaagcgcgctcctatgccggccggcatctgcgtcaggaactgatggtttcaaaaatagaaaggatttatcaatcatttttctgaatgataccggcgccgcatggcaggtgcttcaagagcaaaataaagaggccggtgtttaactatccagcctctttccgagctgttttttcatctcatacagagtctgctgactttgtccgcccgggccgcctgtcattcctcatcgggctgagcctgtttttccggtgctgtatcggtcagctgagatttttgtgccgttctttttaatccatgagacaagctttgtgttgcctgaattgtttccggataataagaaatagttcacttttccttcgtcaacaagttttttcagctgtgagacggttttaccgaaattttcttcatggaaaaaagaggcggaaagccatcgcttccgcctcccgcacatatatatgagagagcagcctttatttgtgatcgttctctttttggatttcagctaatttggcaagcagaatgtgctgaggcatgtgcatgattctctcaagcggcatattcagtgattctgcgagcttttgcgccgtttcggcggaaatttgcagcggtttcatgtgatcactccttccgtttctttattgtactaaaatcagaaatctatcgtaagaggatatgacaaaggaatggaggtttgaaaagcggggctttataacagaatgggggaggttttttatgcaatcgccattgatgttattacagctgaagctggctgattatcagaaaaaagccgcagaactgcggacaattgacgaatttatcatactgaaacagacattgcaggacatgatgaaagtattcgccgcctttgaagaatgggagctgtatcaaaaaacggccgatctcatggcgcagacggtgctgcacatccgtttcatcgaataagaaaagccctcgcacgggcgaaggcttttcttaaaaggaacgttcctcttcaatgtttttatgctgatcataaatgacaagcttagccgggctgttctctttcgccatctgctccgctttttcaatcgccgcgtcctttgatgtacaaagagccgtcggcgccacattttccaccttcacaaaccatccgtccgcatcaacactgggtgttactgcatatgttttcatccttcttacctcccggtttcgatttatttatttgtttcccggcattcggaacggtaaaacacataaccctctcctgacaaatacagggaaagtgatatttttctattctttttcatgagaaatggtaaaatgaaatttggatattttttaaggaaaggacggtgcttagcatgacagaccttctgaatgatcggctgccgccgcaaaacatagaagctgagcaggccgtgttaggtgctgtttttttacagccgtctgcgttgacactggcttctgaagtgttgattccggatgatttctacagaatgtcacatcaaaaaatttacaatgccatgctcgtgctcggagaccgcggtgaaccggttgatttggtcacggtaacgtcagagcttgcgaataccgatttgttagaagaggtgggaggcgtctcttacctgacggacatcgcgaattccgttccgacagcggctaatatagaatattacgcgaaaatcgttgaggaaaaatccattctccgccgtttaatcagaacggcgacctcgatcgctcaagacgggtatacgcgcgaggatgaagttgaagatttattaagcgatgcggaaaaaacgattatggaggtcgcgcagcgaaaaaattcgggcgccttccaaaatattaaagacgtgcttgttcaaacatatgacaacattgagcagcttcacaaccggaaaggcgatattaccgggattccgaccggctttatcgagcttgaccggatgacggcgggttttcagcggaatgatttgatcattgtcgcagcccgtccgtctgtggggaaaacggcgtttgccttaaatattgcgcaaaacgtggccaccaaaacggatgagagcgtggcgatattcagtcttgagatgggtgccgagcagcttgtcatgcgtatgctctgcgccgaagggaatattaacgcccaaaatctcagaacgggtaatctgacggaagaagattggggcaagctgacgatggcgatgggaagcctgtcaaacagcggtatctttatagatgacacccccggcatccgcgtcagcgaaatccgttcaaaatgccgccggctgaagcaggagaacggattgggcatgattttaattgactacctgcagctcattcagggaagcggccgttcgagcgacaaccgtcagcaagaggtatcggaaatttcacgggcgctaaaagcgctggcgcgggagctcgaagtcccggtcatcgccctgtctcagctctcccggggtgttgagcagcggcaggataaacgtccgatgatgtcagatatccgtgagtcgggaagtattgagcaggatgccgacatcgtcgccttcctgtatcgtgatgattactatgataaagaatccgaaaacaaaaacatcatcgaaatcattatcgccaaacagcgtaacggcccggtgggcaccgtctcactggcttttgtgaaagaatacaataagttcgtaaatctggaaaggcgctttgatgacggcggtgttccggcaggtgcgtaaagcctcaagcaatgtcttgaggctttttttcatccgaaagaatgagagaatgccgtctgttcggcagtcgataaaaagaaagcgcttttatataatggcattaagggagggatgatgatgacaattgaatttccgcaatttcaagcggcgcaaatccggattgcccggccgaccggacagctcaaagaaatcatcaggttttatgaagaaggcctcggattgaagagggtcggcagtttttccggacatgagggctacagcggcgtcatgttcggcctgccgcatacgcaatatcacttagaattcaccgaagaaaccggctcgtctcagccggcgcccgttccgcacggcgacagcctgcttgtcttttacatccctgatcagcaggaggtcattcgcatcagcacgaaattaaagcagatgggatatgaggagaaagaacccgaaaacccgtactgggaagaaaaaggcgtgaccatcgaagatcctgacggctggcggatcgtcctgatgaatacaagcggaatataaatgactgtctgaagaacccgggatatgggttctttttcgtgttaaagtatgaaagtttcgggagtaatagatagcaaatgaaagagaaaacgcttttaatcaggtttaaggcgaacaaatatagaataataagattttaatgttcggatttacgattgactttctgtttcggcactgatacacttaatttgtttgaatgagatatcgttttgaaaggttaacggaggtgcacggatatatgtcttcagtagtcgtagtaggtacgcagtggggcgatgaaggaaaaggtaaaattacagatttcctatcagaaaatgcagaagtgatcgcacgttatcaaggcggaaacaatgcaggacataccatcaagtttgatggcgtcacgtacaagcttcatttaatcccatcaggaattttttataaagaaaaagcgtgtgtcatcgggaacggaatggttgttgatccgaaagcgctcgtaacggagcttgcgtatcttcatgaacgcaatgtgagcacggataacttgagaatcagcaacagagcccacgtcattcttccataccatctgaaactggatgaagtagaggaagaacgcaaaggggccaacaagatcggcacaacgaaaaaaggcatcggacctgcttatatggacaaagcggcgcggatcggcatccggatcgcagacctgctagatcgtgacgtgtttgcagaaaagcttgaacggaaccttgaagagaaaaaccgtctgctggaaaaaatgtatgaaacggaaggcttcaaaattgaagatattctggatgagtattatgaatacggccagcagattaaaaagtatgtatgcgatacatccgtcgttctgaatgacgcgctggatgaaggccgccgcgttttatttgaaggcgctcaaggggttatgcttgatattgaccaagggacatacccgtttgtcacttcatccaacccggtcgccggaggggtgacgatcggttcaggcgtaggtccgacaaaaatccagcacgtcgtcggtgtatctaaagcgtacacaacccgtgtcggtgacggtcctttcccgactgagctgaaagatgaaatcggggatcaaatccgtgaagtcggacgcgaatacggcacaacaacaggccgtccgcgccgtgtcggctggtttgacagcgttgttgtccgccatgcccgccgtgtcagcggaatcacagatctttctctgaactcaatcgatgtgctgactggcattgaaacattgaaaatctgtgtcgcttaccgctacaaaggtgaagtgattgaagaattcccggcaagtctgaaagctctcgcagagtgtgaaccggtatatgaagaaatgcctggctggacggaagatatcacaggcgcaaaaacattaagcgatcttcctgaaaatgcgcgccattatctggaacgcgtatctcagctgacaggtattccgctttctattttctctgtcggtcctgaccgttcacaaacgaacgtcatccgcagtgtataccgcgctaactaagaatttgcagcaaacaagcctccggtcacggaggcttgtttttttatgtaggaaaaaaataatagattttttttcaaaaaagtagttgccactttcgaatgttctatgatattataaatctcgttgttacggaacagcttcaatagagtactgcaagaaagcttttgtctcaatgctctatgatacataatccgacacatcaagagccattagctcagttggtagagcatctgacttttaatcagagggtcgaaggttcgagtccttcatggctcaccactttttatggcccgttggtcaagcggttaagacaccgccctttcacggcggtaacacgggttcgaatcccgtacgggtcattgatttactttagcgttattgctaactccttatttgtcctcggagggccgccacgatacggttctccggacaaattactgtaaggtccggtagttcagttggttagaatgcctgcctgtcacgcaggaggtcgcgggttcgagtcccgtccggaccgccattttactttactttatagtatagaaaagaaacatctggctcggtagctcagttggtagagcaacggactgaaaatccgtgtgtcggcggttcgattccgtcccgagccacttacccaaacgcatctgcaatagtaggtgcgttttttcttttgttataaaaaagggagagccggcttttcagccggcccagaagaagacgtcaaacactagacggcgttttttttcttaaggtttcaaaaaaatattattttttaaaagaaaataaaaaacatgacaaaaggatggcagttcaatacgtttttgcgctgttctctttaatttttttatcttttgacctgaaaccgttataatagacggggaacgtttttcacgatacgaattgtgatcatcatgaaacatcaatagatgaaatgaagtcattctggcaggaggaaaatcaagatgatggataagaaaatccttgtagtcgatgatgaaaaaccgattgcagatatattagagtttaatttaagaaaagaaggctatgacgtgcattgtgcgtacgatggaaacgaagccgtggaaatggtggaggagcttcagcctgatttaattcttttagatattatgcttccgaataaagacggagttgaagtgtgccgggaagtccggaaaaaatatgatatgccgattattatgctgacggcaaaagactcggagattgacaaggtcatcgggcttgaaatcggagcggatgactatgtcacgaagcctttcagcacgcgtgagcttctggcccgcgtcaaagcgaacctgcgccgccagcttacggttgcgccggctgaggaagaatcagcttctaatgacattcatatcggttctctcgtcattttccctgacgcttatgtcgtatcaaaaagagaagaaacgatcgagctgactcatcgtgagtttgaattgcttcattacttagccaaacatatcggacaggtcatgacccgtgagcatctgttgcagactgtgtggggctatgactatttcggtgacgtgagaacggtggatgtaacagtgcgccgtctccgtgagaaaatcgaggataatccgagccatccgaactggatcgtcacaagacggggtgtcggttattacttgagaaatcctgaacaggactaaccggcgatgaataaggttggtttttttcggtcgattcagtttaagatcacgctgatctatgtgcttctcattatcatcgccatgcagattatcggcgtgtactttgtgaaacaggtggagaattctcttctcaagtcctatgaattatcgttaaatcagcggattgacaatctatcctattatattgagcaggaatataaaggagataatgacagcaccgtcattaaagatgacgtcaaacggattttgaatgattttacgaaaaacaatgaaatacgggagattacatttgttgataaaagctatgaggtcgtcggttcttcgaggccttatggcgaggaaatagcggggaaacagacgactgacccgatttttaaacggattttctcaacaaaacaggcctattcaaaaaaatattatgatcctaaaagcaaaaacagagtgctgatttcagcaaaacctgtcgtcacagagaatcaggaagttgtcggcgcgatttatgtcgtggccagtatggaagatacctttaaccagatgaaaaccgtcaactcgattcttgcttcaggaacaggcttagcccttgttctgacggctcttctcggtatatttctcgcccgcaccatcacccatccgctatcggatatgcgtaagcaggcgatggaactggcaaaagggaatttctccagaaaggtgcggaaatacgggcatgatgaaatcggtcagctcgcaacgacattcaaccatctgacgagagagcttgaagatgcccaagccatgacggaaggggagagaagaaagctttcttccgttatcgcgtatatgacggacggtgtcatcgctacgaatcgcaacggggctattattcttttaaacagccctgcgcttgagctgctgaatgtttcacgtgaaacggctttagagatgccgattacgtctttattgggcataaaagagaactttacatttgaggatttagtagaacagcaggattcaatgctgctggagatcgaacgtgacgatgaaacgactgtactgcgggtgaatttttccgttattcagagagagcacggaaaaatcgacggtttaatcgcggttctttatgatgtcaccgaacaggaaaaactcgatcgggaacgcagagagttcgttgccaacgtgtctcatgagctgcggacaccgctgacgaccatgcgaagctatttagaggcgcttgcagagggcgcgtgggaaaacaaagatatcgctccgcgtttcttaatggtgacccaaaatgagactgagcgcatgatcagattggtgaacgacctgcttcagctttctaaattcgacagcaaagattatcagtttaatcgggagtggattcatatgatccgctttatgtcactgattatcgatcgttttgaaatgacgaaagaacagcatgttgaatttatccgcgagcttccggacagaaatctgtacgtggagattgatcaggataaagtgacgcaggttctcgataatatcatttctaacgcactgaaatactcaccggaaggcgggcatgtcactttctcagtcgatgtgaacgagaaagaagagctgctttatatcagcgtaaaagatgaaggtatcggcattccgaaaaaagatgtggaaaaagtctttgaccgtttctacagagtggataaagcgcgcacgagaaaactcggcggcaccgggctcggccttgcgattgcaaaagagatggttcaggcgcacggcggagacatttgggccgacagtgtagaaggcaaaggaacgaagattacatttactcttccatataaagaagagcaagaggatgattgggatgaggcgtgaaaatataaaaacagtcatactgtcagtgctggtcgtcattagtcttgttttaacatggggaatttggacattccagcccaatttttcagaaggcacggcctcaaccaaatcgactgtccgggaaaagcataaaattgataaaacgagccaaaaagtgtcgcaaacggtaaaaccccgggatatgtttattcatacaaacggctctcattataaagtggatgatgagacgctctttaatgacctgtgggcggatttgccgcaatgggaagtaaaagggatgaaggatatttccgatcaatacgacaagctcggttttaaaaattggctttacggcagaaacggcaattcggcaaagctcgatctgcaattcaatgacaccattccgattgatttcttccaatcgatgtttaaatggtcaaatccgtcaatggaatacagctcatttgaccatattgttattccgtttaatgagaataagacgaataagaagatttacatggtctcgtacagcaagcagctgattttggaagtgactgtggaatcggcgaattaccgcaatctgatgaatgagctgtacagcaaaaagtcgagtatgccgttataccacctctattcggtcggaaaaagcaaagaatttctcatgccgaatgcgcggtttaatatgaaggaaaaagaatttatcactgaaaccattaagacgaacctgtttaagcagacgctttttaatgatccgagcacggtcagagaggacccgaattacaatcggaatgtgctgactgacggaatcagccgtctggaaatcaattcgacacagcggcagattcaattccagcatcggaatttggcacaaagcgcttcttaccaaacgggtgagctgattaagaaaagctataaatatttagaggatacgggaagctggacggatcattatcaatttttcaatgtgagtgataaccagcagctgagtttctacatgtttaaagaccaaatgcctgtgatcaacagcacgtctaagcctttcggatccggacctgttttgaccctgcaatgggccaatgacgaggttctcagctacaagcggccgaactatgttctcgggccgaatccgattaaaacaaaagacgtaaaaatgatgaacggcaatgaggttgtgtctctgctggagcagcaggataaatacgacgtgaacaaaatcgaccagatcttcctgtcctatcaaatggtctcttcttcaacgaatgatctcgttgaactggaacccgtctggagtatgaagatcaacgggaagatcgtcccgattacgaaagatctgctggggaaggaggaggacgataatggagtggaataagacaaaaacgatcttcatcattgccttcctcatcctcgatatttttctcggctatcagttttttgaaaaacgctcgagcagtgaatacgaagtgattaaaaattcaaacgtggaaaaagacatggagatggaccatatcacattcggcaacctgtcttctgattccgcgacgggctaccggctgacggcgggccaaaaggtatttaccgctgaagatattgatgctttgaaggatcaaaagccgttaatggaaatgccggcggatgatcataaggtcacaacgctgaaaatgaaatttaccgatccggtcggtttatcgaagcaaaaaccgcaggaggatgcggaatcgctcgtcagttctaaagtaaccggcggtgaaaaatataaactgtggaaagtcgacaaggatcaaaaacagatcattttttaccagacatatgacggacagtttatttatcaggattttgactcgtccacggatgcgatcggacaggtgattctgcatctgaacgataaaaaccaggtcgtatcctacgagcagaccatgctggagtcattcaagcgaatccagaccgagagcctgattcctgagcttgatgcggtcgaattattgtattctcaaaattacttaaaagcgaattgcgccgttaaaagcgtcaagttcggctatattgcccaatacccgctgacaagtacgcaggtgctggcgccggtatggagaattacaattgaagataagtcaaaagggacgaagaaaaagacacagcaaacgtacactgtgaatgcattggaaagcacagtcattgataacaatcaaaataaataatggagtgagacacaatgggcttgcaatttagcgtgcttgcgagcgggagtaccggaaacgcgttttatctggagacagaggagcattcttttctggtggatgccggcctgagcggtaaagcgatggacgggctgatggagagaatcggccgcaagatagacgacgtcgacggcatctttgtcactcacgagcacagcgaccatattaaagggctcggcgtaattgcgagaaagtacggtctacccgtctacgccaatgaaaagacgtggaaagcgatggagaatcagatcggcaagcttgataccggacaaaagtttttgttcccgatggaaagcgtaaagtctttcggcgggcttgatgttgagtcattcggcgtctctcatgacgcggccgagccgatgttttatgttttccactaccaaggcagaaagctcgcgctgatgacggacaccggatatgtgagcgacagaatgaaaggcatcatccgttcggccaatgtgtttgtgtttgaaagcaaccatgacgtcggcatgctgcaaatgggcagatacccttggagcattaagcggcggattttaagcgatgtcggccacgtctcgaatgaagatgcggcgctcgccatgactgatgtcatcggcgacggcacatcgcgcatctatttggcgcatctgagccaagacaacaatatgaaggaactggcgagaatgtccgtgcagcagacattggctgcgaaaggatttgtcgccggggaaacgtttcagttatttgataccgatccgaaaattccgacgccgctgtgcgccgtgtaatttttccaaatgaatcatgattattaatccgcgatctgacccacactataagcaaatcgagtactcttgaaaggatttgagatagggtggattataatcgcgatgatgaacagtacgcctccgaacagccccgccgcagcaagagaggatactttctatcaagtctgatcggcgtcatcgtcggggccgcgctcatggctttcctgatgccgtactggacaggcggagaccatggagacagcagcaaaagcaccagccggcgtctcggcagcgaacaggtgaaaacagtcaacgtaaatgtcaatgacgctgtcacgaatatggtcagccgtgtatcggattcggtagtcggcgttctcaatatccaaaagactgatatttggggagagggcggcgaagcgggaagcgggtcgggcgtcatttacaaaaagaacggaaacacttcttatatcgtaaccaatcaccatgtcattgaaggtgcgactgagattgagatcagcctgaaggatggttcgcgcgtgcctgctgagctgatcgggagcgaccgtctgatggatctcgcggtactgaaggtgaagtctgataaaatcaaatcggccgcccagttcggcaattctgatcaagtcaaagtcggagaaccggtcattgcgatcggaaatccgctcggacttgaatttgcgggatcagtgacacaggggatcatttcaggcacggaaagagcggtgcccgttgactcaaacggcgacggacatccggattggaatgcggaagtgctgcagaccgacgccgcgattaatcccggcaacagcggcggcgctttgatggatatttcgggcaaggtggtcggcatcaactcaatgaagatcgctgaatccgccgttgaaggaatcggcctgtccatcccgtcaaagcttgtcattcccgttattcaggatttagaaaaatacggagaagtccgacggcctttcctcggtattgagatgaaatccttaacggatattgcgagctaccattggagccagacgctgaaacttccgaaaggcgttaaaaccggggcggtcattatgggtgtcgacgcgttttcaccggccggaaaagcgggtttgaaaaagctcgacgtgattaccgggttcgacggacataaggtcaatgacgttgtggatctccgtgagcgcctgtatcgcaaaaagatcggcgaccgtgtgaacatcacgttctaccgttcgggaaagaaaaaaacagcggaagtcaaactgacagaagcagatcgattacagaaataaaaaagcagcccggacatccgggctgttttttattgatttatttgttaatattatactattgtgaagcagggaggtgaaacacatgaaaacggctgatgtgatcatcgtattgaatgaaatcgagggtgaatgtgaaggaagaattattttagaatgcagaatttaagaaaatgaaacatgtcatattaaacgtcctttttcaggggcgcttttttttatgccttttttcagaagctataaaaaagaactgaacgcgggtcacaacacgttcagttgaaaatggatatatgtagaaaaaggcagacatgaccttagaactttgtgattgaaacagactggtgctgctgaatagcggcagatgaaactgccggcagcttatttgcagatggctccgttttcagcgtttactttcaccaattcagcttagcttccgttttgtttcagataaaagcgaataatagaaggggaagcgaaaaaaataaacacaggctgatacatctaaggagagactgcatcatgaataagttgaaaggcatcaagctgctgagtgcagacggcgagtctgcactcattgattctttaacgatggggcttcatcacggaacggttctcggggaagacaatatcgtcgagacatacattcgttctttgcgcgaaaagctgaaggacaaagaacacaaggtgattcgcacggttcggggcgccgggtacagggtggacctggcatgaaacggctgtacagaaccctgcggttccagctcctgttcaggtcactggcgattttgaccttgctgttatgtttcatcggcggtacacagtacatgtttatgagacggacgatgtatgaaaatcaggcgatcagcattcagagtgatatcaattcaatggatcaaagcgtatggaggtcaatcaaaacccctgcccgttccgaaacaccggctcatccgaatgtgatttatcccggggtgacggttgcttttatcaatcaatcatacaagatgtcagttttatcagaagacccgcacgcgggagccgctccttctttcccgaaaaacgtgtatcgggatgcgctgacagatacaatggcgcttcactatcaggtggctcacaataaggcgggtgaggaaatcatcgtcgtgtttcaggcgatttccgttgacggaaggcaggcgggagttgtacagatgagcacgctgacccagcctctgaatgattcgcttttccgccagatcagcattttcgcgatactttcctttgcggctttggttatcggactgtttgtttttttgccggtgatccggctcacactcaagccgctgtcccgcattgtgcatatgatgggtgacattcatgccggcagtctcgataaacggctgccgattgataggaagcaggccgaaattgagtcattgggcatctccatcaatcagatgctggaacggattgaaaccgcgtttcaggcggaaaaagaagcgaaggagcgcatccggcggtttgtatcagacgcatcacatgagctgagaacgccgcttacctccattcacggctttatcgaaattttaatgcgcggagcggcggaaaagccggagcagaaagaaaaagcgcttcaaagcatgtacgcggaatccgtcagggcgaataagctgatagaggatcttttgtttctcgcgaagattgaccgggagccgagctttgaaatgaaaaaaggggcattgggagacgtcattttggaaatggaggctgagctgaagctgcttgcgagaaaccggaaactcgagttctttgttgatcaaaagatagaagctgtttttgacaaagacaaaatgaagcaggccattctcaatctcttttacaatgcggtgcagcatacggatgaagacacgggtgtcatcaccgtctccctgcagaaagacggaggaatcatgcttatgattgcggataacggaacgggaatcgctccggagcatgtgcctcatgtgtttgaccggttttacagggcggaaacctcccgatcccgtcaatccggcggcgcggggctgggtcttgccattacaaaaaccattatcgacagccataacggaacaattgaagtgaaaagtgagcagggaaaaggctccgtgttcatcatccggctgccgggataaaccgggatagcggaagaaatatcacaatttatatataaattctaaattttcaaaaaataacttgtccttttccaatattgatgataatatctagttattggcaaagggggtgtgtactgatgaagattgaagaacttgatcttgatacagaaacagcaagcttggtgcatcgctgctagtaaagccgtgactcccctttttggggagttattatctttcagggggtatgtcatgatgtcaacggactgtaagcgctggaagtttaaagacagcgtgcaggtgctgacctacacggggcatattatcattcaatatcgaaaggcgattaagcttgcgcatacgagtgagatcaaagaggcggttgaacggctgatcaccggctgtgaaaaacaagagctttctgatcttctgggagaggaagcgggaaaccagtttttcgatgcgttaatgaaattggatgctttaatagagccatggcaaaacggccgtgaaggctgcatcactgaaaagcagctgtaccattttgagaaatacaaccaaaaccccaatctgatccaaaacagattagacggcagcagggcagcgatcgtgggtctggggggcgtcggaacgatcattcttcaaaaccttttggcggcgggcatgcagcattttattctcattgatttcgatgccgtatcagtacataacctgaacagacaattcgtctatactcaatcttctgtaggcaaattaaagatctcagaatgcagagattatatcgcgggtatcaatccccatgcggacgcagcactttaccatcaggaaatgacacagccgcaggacctgcgtgtgttagatccgtacgaaattgatatcgtcataaatgccgctgacaaaccccataacatttctgaatgggtttatcagtattgtaaggagcggaatatcgcgtttatgaccgggggtgtcggcagcttcagcggccaatgggggcctctgctcacgcctgaatcctatcaatccggcgtcacctatgaaaaaaacatgccggccggacttctgaactgttaccccgatgaaccgatcaaaggttcgttaggagcgacaaacggtattatatcctcgtttatgtctcatgacattatcacataccttgcaggcggaagcccgaaatccctgaatacccgcatcggcctggactttgacggacttcatattacagaaacgaagctttctcaaaaggaaagcgctttatgaagacgatgcatcgtacggcgagaaaaccgggcgaccctctgaaaatagaaatcgacacaagcccgatacgcttgaacccattagatacgcaggattacacaagcaagatgatttgcagcattatgtatgaaagcctgcaggacggctataactgccgaatcatccgcaaagatcgccgcacctgtcaggtggacattcacccggactatttaggtgacgccgagggtgtggttcaaacgatcatctatcatctgacaaaagaaaaccaaagtccccatctcggcagtttcctgaacataaaacaggccgttccgtatgtaaaaggcctcgtctcatccgatcagctcggggtgaacgtaacgggcgaaaaacgctttgaagtcaccttggacgagccgtctgatgaaatagaagccgttttgcagagcagctttctgattccggcgaccgccgggggcgatgtgccggaaaatggcccgtaccgattcaagcgtacgtttgagaagggactggaatttgagcggaatccgcaatataaaatgacgcccgcggatcaccgcaccgttcagatcatccaatttattttgaatgatgatctggaaaaaagcatctggctgtacgaagcgaatcagaccgatgtgacctgccacacccagtttcatcattccaacatgaggtatcggcagtatgctgattttaaagaaaatcatttgccgatgttatttaccttcaaggtaaaggacggcatgctgagaactttcattcagcattattttgataaacaaaagctggccggcgatttggggcatatcatcacaccgactgattcactgatcggtatatgggaaagcggacggacaccgcagaaagatccgccccttttgacaaaagaagagccgatccgaattgtttatgccgattattatcccaacggagagatcattgaaaggctgactgaattgtttcggagggccggagcggacgtatccgtctcccgcgtcagtcatttcaatgattattaccatatggataaaagcgggtttgatattgagcttcatttgttcctgccggcttacatgcatgagctgagctatatcaaatatttcattcgcgacatcagcgatccggggaagaaaaaaacgatcattgatgccataggatctgaaaaaaagaaggaactttttgggttattcgagaatacaactcattattgcccaatttgttttgggaaaagtctgtatctgcaagatccatgtatagagggttttagtgtaaagactgacgggctcctttctgttcatgatgttaaatgcagatagctggaaaggggtattcatttgcggaatcgaaatttgctttacttctccggttttttcggaaacttctttttcgaacggggaatttggattttatatttaacaagcatgaattattcattgtttctagtgggcatcctgcaatcggtcctgaatttggcgatgtttctggcggaagtgccgagcggcgtcatctcggacagaatcgggagaaaaaaatcgctcttgctcggtcattttatggtcattgtctatttggtgatgttcctgagcttccataacttcatcgccctcttcatcgctcatattatatacggtatcgggctgacgtttatatcaggaacggatcacgcctttttgtttgattcactgaaagaacaagggaaagaaaagtggtacggcaaatccatcggaaattataacggacttgtcatactcggtcttgcgatcgccatgggcatcggcggctacttgcaggaaatatcatggtcgtatgtgtttatcgccgggattgtgactcagctgattgcgatggcggtcattacacagctgacggagatcaaatttgaaaacagtgaacacgaaacgcagacggtcggggacatcttaaaagaagtcaaagatttcttcaggctgaacaaagcctttaaatatttggtgctgtcactctccgttttctttgcgattacatcggttttttatatgtacggacaagatctgttaagtcaggaagggctgtccgtgcgcaatatatccattatttttgcggggctgtccatcttgcaggcactgtgctccatcttttcttcaaagccggcggaaaaattcacgccgaggcgcgtgcttctgctgacattctgcatcatcggggcggcctatctgtttataccttcgggcagtctgtacgtgacgattgcagcttttgttgtcatcaacgcgctctatgatgtgatagaacccgtatccagtcaggtggtgaataatgagattccgtccagaacgagagccacgctgctgtccattatcagtttgatgacctcgctcttcatgttcattgcctttccgtttatcggattcttaacggactattttgattcagctttgctgctgaccgcaatcggggtattatccatcttattgtcgctgtttatgatgctcagcttttacaaactgaaagcgagcgtcgccatccagaataaagtcgagctttgaaccagaatgacaaagggatgatgtgagttgctgaatattcataatcttacggtaaatttagcgggagataccattttcaaacaagtttctttcttcatcaatgaaggcgaaaaagtgcttgtggccgggccgaacggttccggcaaaagcacgctgttcagggtgctttcaggggagcttgaggcggatgaaggaacgattgcgatcaacaaaggggcgaaggtcggtttgctgaagcagatcgctgatccccatgaggatctgacgttgtatcaatatctggaaaaatcgtttgaagctctcgcggcgatccagaaggaaatgaaggccattgagctgaagctttcggaaccgatgggtgaggacgagctgactgctttattggaaaagtacagtcaatacacggaaacatttgagcggaacaacggctaccagatgcatgcgatgattgacgaggtatgcaacgggctcagcctcagcgaattaaaggatcagccgttttcaaagctgagcggcggcgaaaaaacaaaagccggccttgccgaaattttaatccgcaacgacgacattatactgctggacgagccgaccaaccatttggatgttcatgcgattgagtggcttgaagggtttattaaaaaatcgaataaaaccattctgtttacgacccacgataaaacgtttgccgaccagacggcgatgaaagtgctcgagattgacgataccgaggtgaagatttggccttacggtttcagcgaatacctgaaaaagcgggaagaattcatcatcgcccagtttgagaaatatgaagaacagcagagaaaaatacagaagatgaaggaatccatcgcccagctgagagattgggccaaccgctcgaatccgccgtctgtcgggctgcacagacgcgcgaataatatggaaaaggcgctgaaaaggatcgagctgatcaataagccggtccggacggagcaaaaattaaaaaacgcatttcaggaagcgggcgccggttcaaaagatattgtgttcattgaaaacggaaaggtggccaacggatcttcccttttatatcaaaatgtgaatctgcgtataaagcataaagacagaatcggcatcgtcggcagaaacggcgtcggcaaaacaacgctgatccgctgcatcatcggggaaagagaactgtcggacggcaccattaaagtaggggaaaatcttaagataggctacattgatcaaaagagccacgtcggagattcgagtcagacgattctgcaattctttaaagaaaatctgctgactgaagagggcatggcccggaatatgctggccaagtacggattttacgggtcgtcggtctttaaaaaactttccgtcctgtcgggcggtgagagaatcaggctgaagctgtccatcttaatggaaaaaaagctgaatgtcctgatcctggatgagccgaccaaccacttggatattgaatctcaggaaattctcgaaaacagcctgatgcagtttcaaggcaccatcatctgcgtttctcacgacagaaacctgctggagaagttcaacaagattttctggcttgagaatcaaaacgtcaccatcttttcaggtccatacagttacgccaaacaaaaaaaacggcagattgccgaataaaaggggaatggatatgaccattgacagactgacaatcaatgagttatcgtacgatctttttgtaagcgagtatgctgataagaaaccttttattttgacgggggcaatggatcactgggaatgcaggccgtggacgcttgaatacattgacgaacactatggagacagaatggtcaccatccggaaatcagatatcgaaggggtcaaaacgtttaaacaagtaaagctttccaactatatcgagtacattgatcagaatgatgacaaatggtactgtgactggaattttacgcagctgaaccaaaatgacttagaccttgtctattccgcacccgagtattttacaaaagacacattgagagcggatgaagaaacgggacgggactggaaatggttctttctcggttctaagcagacaggcacgccgctgcatcaggattttaacagcacgcacgcgtggaacggcgtcattttcggggagaaggaatggattttctatcatccggacgactctccgtatttgtacgaaggaaatatcaatgtctttgatgaaaaagatatagagcaaaaaccgctggcgcaaaaggcgtctccgatccgcttcaggcaaaaggcgggagaaatcatttacgcgccgcgccattggtggcatcaagtcgagaatacggaacatacattggcagtgagtgagaacttttggtttaccggagagcggcttgccaatcagatataaacgaaaggctgaggagcacctcagcctttttttgtatggattcatttcatccggtccagaccgaattttttcaggcggtattgcaggctctgcctgctgattccgagctcgtttgccgttttggatatgttattgccttgttttctcagggttttttcgatcatgtatttttcgaagttttccattttgtcttttaaatctgtgccgggctgggtgcttgcggctgctttgctttccgtgtcagcgggtttgattttcatccggtattggtaaggcaggtgggccgccgtaatcgtcgtttcatccgtcataaagttcatggcgccttcaatcatatgttcaagctcgcggatgttgcccggccagtcatactccaggaaaaattgctgcacatcgtcactgatcgaatcgacatgcatttgaaacaggtggttgtttttctgaataaacacttcggccagaggcagaatgtcttccttgcgctcccggagcgggggaatgatcagcgtgacaacgcttaagcggtagtataaatctttgcgcagccgctcttctgaaatggcggtgatcgggtcttcattcatcgtggcgatgatacggacgtcaatcggtttgtcctgagctgatccgatgcgcctgattttcttttcctgaagggcgcggagcagttttgcctgcaggctgagattgagagagttgatctcatcgaggagcagggtgcctccctgcgcctgctcaaataagccgggctggtcgatggctccggtaaaggcgccttttttcgtgccgaataaaatactttcgaccagactgtccggcagggcggcgcagttttgtgagatgaacggggcgcctgagcgctggctgccgttgtgaatgctttgggcgaacagctccttgcctgttcccgtctcgccggccaaaagcacggacgatgatgtacgggttgcccgtttcgcgttttcgatgacttcctgaatgaccgggctgttgccgagaatgctgtcaaacgtgtagctgttctgttcttttctgtgcatgttctccctgatcagccgttcgagcttggtgacgtccttggcgatttccacggcgcccttgatctcgccgttttgcacaatcgggaaggtgtggttgatcgtcgtgatttcctggcctttgttattgaaatagctctgctttacatttttaatcgttttgccttcttgaagggcctgaacgagcgtgctgtcctgctgattggaaaacataaatacatcagtcaggtttttatgcaggacgtcccgttcatccatatcttcaatctgcatcattttcttattgtaaatgacggtgctgcccttctcatccaccacatgcagcccgacatcaatctcttccagaatgctttgtaacacgagtgtgtaaaattcgctggttgtgtgcaggtcaattccccctctcaatcgtcttaacattcattattttaaaataaatcgaacaggaaacgcaaaaaaattttgcgcttggctgaagtttgcacgcaaactgccggaatattttgcaggaaaagaaagaatgctggcgaaacatcccgttttttcggattggcacggaacttgctttataaaaagggaaagcaagatctaatgttgaatgattacaaaacaagggggaatcagattatgtcagctttcacaaaatctcaagaaattatcagtcaaacttcacattacggcgcgaacaactatcatcctctgccgattgttatttccgaagcgcagggtgtttgggtaaaagaccctgaaggcaatcaatatatggatatgctgagtgcttattccgcggtgaaccaggggcacagacatccgaagatcattcaggcgctgaaggatcaggcggataaaatcactctgacgtcacgcgcgttccataatgatcagctcggcccgttttatgagaaaacagccaagctgaccggaaaagatatgattctgccgatgaatacgggggcggaagccgttgaatccgctgtcaaagcggcgagacgctgggcatatgaggtcaaaggagtagcggataatcaggcggaaatcattgcgtgtatcggcaacttccacggcagaacgatgcttgcggtatccctttcttcagaagatgagtataaacgcggtttcggacctatgcttccgggtataaaattaattccatacggggacgcagaagcgctgcgccgggcgatcacgccgaacacagccgctttcttattcgaaccgattcagggagaagcgggcatcgtcattccgccggaaggatttttacaagaagcggccgctatttgtaaggaagaaaatgtgcttctgatcgctgatgaaattcagacgggactcggccgcacagggaaaacattcgcggttgattgggaaaatatcgtaccggatatgttcatcttaggcaaagcgctcggcgggggcgtcttcccgatttcgtgcatcgcggcgaaccgtgacattctcggcgtgtttaacccgggttcccacggctcgacattcggcggaaacccgctcgcttgcgcggtatcgctcgcatctcttgaagtccttgaggaagaagggctggcagagcgttcccttcagcttggccggtattttaaagaagagcttgagaaaattgataacccgatcataaaagacgtgcgcggacgcggcctgtttatcggtgttgaactgacagaagcggcccgcccgtactgtgaaaagctgaaaggcgaagggcttttatgcaaagaaacacatgataccgtgatccgttttgcaccgccgttaatgatttccaaggaagacttggactgggcgatccaaaagatcacaaacgtgcttcaaaacgcgtaataccttgatgcggcaatgctttccctcggcttgtatggaatttacaaataaaaaattcagcacactctatttgcgcggagacagtattttagtataatgtatctttatgtacgaaaatgaatttcatataacattcatatacaaatagaggctctttggacagcaaatcggtttcaaagcaccggcttggttccaatacaagttgctgaaggggtgcagaatagtgaatacaaatcaaaaagagaatcagcttcagcgcacaatgaaatcgcgccatttgtttatgatttcattaggcggagtgatcggcaccgggtttttcctgagtaccggatttacaattaaccaggcgggaccgctgggcgcggttctgtcttatctggtcggcggttttattatgtttttgacaatgctctgcttaggcgagcttgcggttgcccttcccgtatcagggtcgtttcagacgtacgcaaccaaattcatcagccccgctttcggtttcgcattcggctggctgtactggctcggctgggcggtgacatgcgccattgagtttttatctgcgggacaattgatgctccgctggtttccgcatgttcccgtatgggtgtggtgcctcgtgtttgtcggactgatgtttcttttgaacgcgattaccacaaaagcgttcgctgagtcggaattttggttttccggcattaaaattttagtcattctgctgtttattattttgggcggtgccgccatgttcggcctgatcgacatgaaacacggcgagcaggctcctttcttctctcatttttatgaggatggattgtttccgaacggcattaaggctatgcttattacgatgattaccgtaaacttcgcgttccagggaacggagctgatcggggttgccgcgggagaaagtgaaaatcccgagaaaacgattccgcgctctatccggcagacggtatggagaacgcttgtctttttcgttctctccatcatcgtcattgccggcatgattccgtggaagaaggcgggagtggtcgaaagcccgtttgtcgtggtgtttgaacaaatcggtattccatatgcggccgatattatgaactttgttatcttaattgcgctgctctcagtggccaactcaggcctgtttgcatcgacgcgtatcttatatgccatggcgaacgaaggacaagcctttaaatcgctcggcaaaacaactaaacgcggcgtgccgatgaacgctctgatcgtgacgctggccgtcgcctgcctgtccctgctgtctaaagtggcagcgccggaaaccgtttatatgtttctcttatcattagccggactaagcgcgcaggtcggctggattacgatttccctgtcacagctgatgttcagacggaaatacatccgcgaaggcggcaaagtggaagacctgaagtttaaaacaccgctgtacccggtgctgcctattatcgggctgacgttaaatacggtcgttctgatcagtctcgcatttgattcagaacagcggctcgccctttattgcggcatcccgttcatggcggtgtgcgttatcgtctatcatctgtatgtaaaaaagcataagcagtcagaaaaacagatagagctttaaatcttttcgtgtccaagtcatctttgagaaacccgcacaggacaacatacaacatgttgaggtggaaaaacggatgaacaagaatatctcagttattggaatgccgatggatttaggacaagcacgacgcggagtggacatgggcccgagcgccatccgctacgcgcatctcattgaacggttatctgacatggggtatgcggtggaagacttaggcgacatccccgtcaatcgtgaaaaactcaaacatgatgaagagctgaaaaatttgaactctgtgctctcggggaacgagcagctcgcccaaaaggtggacagcgtcattgagaatgagcggttccctctcgtcttgggcggcgatcacagcatcgcgatcggaacgctgacaggaacggcaaagcactataaacagctcggcgtcatctggtacgacgcgcacggcgacttaaacaccctggaaacatcgccgtcaggcaatattcacggaatgccgctggccgtcagcctcggcgtcgggcacgacacgttggtgaatctgggcgggtatgccccgaaaatcaagccggagaacgtcgtcatcatcggcgcgagatcgcttgatgaaggcgagcgtgaatacattaaggaaacaggcatgaaagtctatacgatgcatgagattgaccgcctcggcatgacaaaggtcattgaagaaaccattgactacctgtcagactgtgacggcgttcacctcagccttgatctagacggccttgatccgagcgacgcacccggcgtaggcacgcctgtcgtcggcggcatcagctaccgtgaaagccatttggcaatggaaatgctgtatgatgccgacatcatcacttcagctgaatttgtcgaagtcaacccgatcctcgatcacaaaaacaaaaccggcaaaacagcggtcgagctggtagaatctttgttaggaaaaaaactattataaaatatgcgcctccgcacctgcggaggttttttttgttgccacgaggaaactagcgggctgccaccctctttttggacctgtaaatatgatatatttattacacaaaatgggaaagggaggtgtcctgacagatggctgaggtgatggcccacgaaacagttgcgaaaaaaatcagtgactggtatgaggaaatcaaaaagcacaacactgaatcggctgaggcgttaagagaacaactgcttacggatctgcaaaatatgacacaaaatcaaacggtgctcctttattttaatttaattgattcccgctataagcttttaatggaagagtatgagaaaacagacggcattttaaaaacgatccagctgaacgccgataaagaaaaaacagaccagatgattcaatactattattatttcttttccggaatgcacgagttttaccgtaaacggtttatgaacgccattaatttttaccggattgctgaaagcaggctccggcacataccgaatgagattgaaagagccgagtttaattatcaagtggcgattgcctactatgaaatccgccaaaactactttgcgatgaaccacgcggaaaaagcgttggagatctacaaagccaatgaaatgtacgcggtcagagaagcacagtgtttaatggtgatcggctgtaacagaatggacttgttccactatcagaaagccgaagagctcctgcagacggcggttcatcaagccgccaaagcgggcgatccgcatattgaagcgctcgcccactttaacgcaggcatttgctatgaaagacaggaaaaactggaagaggcgcgggtcgagtttgaaacggctcttgatcaaaaggagcatttgcgatcagcgtattcggtgcggagtctgtacatgctggccagagtgttattgaagcaggcaaagacggatgagggccgattttggctgcataaagcgctgaatgccgctgaagaaaaaaacgagcccgtatacacccaaaagctgcgcatcttacagcatgtctttattgaccgcaatgaagaagcgcttgaatcagctttcgccgagttaagaaggaaagagctgtggagtgacgtttccgatttgtcgtatcaggccgcggcgcattttaaaaaacaggagaaatacaaaccggcggcgaagtattttcaggaatcaattgatgccaatgaccaaattttgagattaacggaggggattcgtaatgaaaacatgtaaattcattgtactctcagcagccttggcaagtctcatttcgattggattatttgcacaaactggttcaacggcacaagccgaacaaatcataaaaccggcggaaaacggagccttcggataatactgcatgatatcgctttcgtgtaaggagtgattcaatggctatcacgctgcagccgatgacaggacaagagtttcagtcctatctcgctcattcaaccaagcattacgctgaagaaaaggtaaaagcgggaacgtggctgcctgacgaagcgccggaattagcggagctgacgtttgaagacctgcttccagacggcttggagacagccgatcactatttatggacgctgacattggacggaaaggaaaatgccggctggttgtggctgcacgccgatccggaccacccgcagcaggacgcatttatttatgatttcggccttcatccgcctttccgcggcaaaggctatgcaaaagaggcgctcgcaaggctggaggacaaagccaaagatctgggtgtccgcaagatttctctccatgtgttcgctcataacgaaacggcgcggaagctgtatgagaagacgggattcctggagacggatgtcattatgagcaaaaagctgtcatgaaaagaggcccgcacgatgggcctcttttgttattcatctaacaatgtcatcatttgttccgggtaacgctcgccggccgccgtgccgatcggaaacatttcatccaaccgcgccttcacatcctccggaagcacaatgtcgagagcggcgaggttctcttccaagtagtgtttcttttttgtacccggaatcggaatgaggtcatcgccgtttgcgagaacccatgcgagcgcaagctgaggcgcggtgatattcatttcccgggcaatggcggtaaatttttggacgagccctatattcaccgccaaattgtctccctggaatctcggcgttcttcttctgtaatcatcggcatccagctgatctgtcgacgtcatctttccggaaagaaaacctctgccgagcggactgtaaggcacaaatgagatgccgagctcacggcaggcgggcagcacatgctcctctgcttccctgctccataaagaatattccgattgaagcgcggcaatcgggtgaatgcggacggcgcgcctgatcgtttctgcggaagcctctgacaatccgatatacctcacttttccttcgtcaatcagcttcttcatggcgccgacagtttcttcaatcggcacccgcggatcaacccggtgcagataataaaggtcgatataatccgtcccaaggcgtttcagactggcatcacacgcttttttcacataatcgggccgtccgttgatttcgataaactcacccttttcgcttcggacataaccgaatttcgtcgcgaggcacagctcctttctgaatggggcgagcgctctgccgacaagttcttcatttgcacccaatccatattgatcagccgtatcaaacaaattcacgccgagatgaacggcatgatgcagtgtggagatcgactcttcctcactctggctgccatagtattccgacatgcccatgcaccctaatcccattgcggaaacccgcatcgaaccgatcgttctgtccttcatatgtcctccccctttcttgtatgataaccagatttcctgatatttgaaaatgatttatgtatatgatttacatattgttataaaatttttaaaaatctgtaaattgtatatttttttatcacaatttcgtcatataatgaaaacgtggaaaaattaacctttgagaaaagaggcgaagtcaatgtgtaaaaagctgttcaaagccgtcctcccgtttgccctgtcattcaccatggttctgtcgttctccggtttgaatgtaaaagcgaaagaaacagaaataccacgctacgcaaaagaaatcgcagaccttcagcagggcacgactcctcaagacgttctccaatccgccaaagagcttgccaaacagaagcacgtttcaacagaagcaattctcaagcagtttcatcaagaaatcacggcagacaaggtgcaaggaaatgtaatcgcttccaaagacggactctctgcgatgggcggatcgtcaggaaccaaaaaactcccgaaaagcacaaaaggcaatatttattacacgaactcatacacggcttattacaatcacgggcatgtcggcatgtattcatccgctgataaaattgtcgaatccgtgccgggagacggcgtccgtcagattgcttataacggcagagaagtcgaagacaattcaatcgtccagaccgtgaaagttaccgatgctcaaaaacaagccgccgctgactgggccgtatcaagagtgggtgatgagtactccttcaacttcgtcaataacagaaatacgggccatgaaggcgccaaaaactgctcaaaactgctgtggtcggcattccttttaaaagcggggattgatatcgactctaacggcggcttaggcgtatacccgcgcgacatcacaagctcgtcctacacaaccacgatcctgaccattcactaaggagaacaacgtgaaaaaaatcatctggatacccttagtgatcatcgccgccgcagcggtcttatgcttcttctatttccgcacggaagaccctgcggaggttgcgagagacacattaaatgaccctgattttctgaaagataaagaggcgttgctgtatttctccactgcggctgaccaagacacgttcggcggcggaaaaagctacgccctcttcgccgatgaaaaagggcggctttcttcttatcaaatgaaggggcttgagctcggatcggccaaagtgcatgacgaaagcgtgctgctggaggacaaaaaaggaatctacaccgttcaggacggccttcacacgtataaaagagcgtaccagcatacgggagacagcgcgggatatatcgaacgggcgaaaggcttttacacgctgtataattcgggctacgacaagagcggcggcagctatcgctcagagctgtaccgccagatggacggcaggtggaagcaagacgtcatcccgcactatatccgcgcctcaggcttttttaaagatcatcttttcgcgctcacgccgacagatgacgaaaaaggctatcacgtccaagacattcaggccgataaagaaaagctccatacaacatcaatcgcgacgtggacgtataaagaaggcacgtctgtcgaatcccagctcgccgtggacgacagcgctgtctgctttgttaccagaggagaaaaagccgatcacatctatcaaatggtgaaagtcatgaaaaacagcggcgccatcaaaacgtatgacatcgccgcttataaaaatgacgaacagacgatctatgactccatgccgttcagcttcaaaaaaagctttttcatggagcatcgcagcttctatttcgttgacggcttcggaaccgtctaccgcatcaaccctgagaccggaaaaagcaaaaaggccttcaccctccccgcatcacgaatgaaggccgacttcaaggagctgacccatcaaaacggaaagctgtatctgttcacgtacagctacaaaaagcccgccaaaatcgaatccttcgacctgaaaacgggcaaaaagctgaacgacctgaccatcccaaacttaaaaaacatcgtcacgccgaaaagccatctcaagctgtatgatgtgcaggtgatggatgggttttaaagagtatgaacatttcggaagagcttgccgcttttggtaagctttttataatgaaacgttactgcgggaaagaaggtgttcatttgaaatcattcagtatcttcttattgttgtccgtcatttgtataaccattgtttttgtcataatgaatatgttgattggataccctgatgtgagtaacggggcattgattatgattgtatatatcgttgtgaccctcatgataaggctatatagcaagaaaaagaaatagaggaatttgaaccgtaaaagcagaagacagtcagatgaaggagggagccgatgaagaaaaagcttgccgcggtgaccgtcaccattctcctggtttccgtgataaccaactcttttttaaacggcggaaagccggactggattgatgtatgctgtacgctgctggcgtgtctattaggaattctgttcgtccttcgcttagaaaaaagagaaaacacgtaaagagccggatgctgaaaacaccggctctttttgcgcgtgatttgccgaattgtggataaaactcagcccgaagcactactaacatgtgtataaataggttatattgaaaagagaacaattgccgcgcgcaaaagaaaaccggaggatgtaacaatgaaaaccgcttattattcttgtgaagaacatatcgaaaccgtgctggacatgtacatagatgatcatgagcttccgcccgaaatcagaaaaatcgaacatactaacagtttatccacagcctgtgaattatgtggggacactgcaacatatctagtagggaacgaatgatcctacacaaaatacagaaaagatatccacaattgtggacaatatatatgaataacttgtttctaaagtggggatgacctgtgaatatcaatattgtgaccatcggaaaactaaaagaaaaatacctcaagcaaggcattgaagaatacaaaaaacgactctcagcctacgcaaaaatcgacatcatcgaactcccggacgaaaaagcgccggaaaacctgagcgaccaagacatgaaaatcgtcaaagacaaagaaggcgaacgcatcctggccaaaatcagcccggacacccacgtcatcgccctcgccatcgaaggaaaaatgaaaacatccgaagaactggccgatacaatagataagctggcgacttatggaaaaagcaaaatcaccttcgtcatcggcggctcactcggcctaagcgacgccgtcatgaagcgcgcagacgacaaactgtcattctcaaaaatgacatttcctcatcagctcatgcggctcatactagttgagcagatttaccgggcgtttcggattaatcgtggggagccttatcataagtgagtgaggtttgcaaataccattttcttgatgtattcagcataaaaataatcgttaaggatcatattttgttataatatattcatatggaaatattatgaatgaaaggatgaccattttggaaagaaaaatagatttacttatgaactcgcgtttcggggagagggtagccgaagaggatgagaatttagcatcgtattttgttgaaacggcagtatggaatcaattgttgatgggggaaattgatgtagtccgaggagtgaaaggttcaggtaaaagtgcattatatatgcaattattaaaaaaagagggtagttttgctgcgaaaaacaccttattaatacctgcagaaaacctagagggcacacctgtttttaaatctgttcttggtgatgctgatttaactgaaacctcgtttcagtacctatggtctatctatatcattactctgataggtgataaaatcaaagattttcgtaatagaagcgaagaagtaaaagattttattagaagacttgaattagaaggtttattagaaggtaaagggataagacgtctccttacgaatgttagagattatgtttttgaattctttagaaatgtaaaagaagttgaaggagtagtaaccgtagaacctacaactaatatacctattttaaaagggaaaatctctttaaatgaaccaagtaaagaacatagagaattaggagctatatcaatttttgaacttcttgaaatggctaatgaggcacttaaaagtgttgacttaagcgtttggataacatttgatagacttgatgtagcatttcccggaaaacctgaatttgaaaccttagctctaagaacactttttcaggtttacaataatataaaactgcacaaacatataaaattaaaaatctttattagagaggatatttggaaacgaattactaaaacgggttttagggaggcaagtcatataacaaagcaagtgacgattgattggtcagaacaggattttttacatttactggttagtcgtattcttgaaaacgatattctttgcaaattttttaatgtggaaaaagatgatgtattaaaagatagtgacaagcagaaaaaaatattctattctattttcccgaaaaaagttgaagtaggaaagaatcctgaaacatttaaatggatgattggacgggttaaggatggattaaaaataacagctccaagagaactcattcatttaatgaatgaggctagggcaaaacaaattaaattgttagaaactggtactccagaaaactcttattcagaaatcataggacgaagtgctttgaaggacgcattaaaagtagtatccaaaattcgtttagagcaaacaatttatgcagaatatgcacatctaaaaaaatacatagaaaaacttgaagaccagaaaactgaacatgatgttggtaccctttcaaaaatatttctaataaacaaagaagatacaataaatattgcaaatgaattagtgtctattggattttttgaggaaaaaaagggtagtcataaaccttattggacaccatttctatacagagccggacttaatatggttcaaggtaaggaagactaatattatagagataagagtaaagggggagtataaagcttccctattaattttttatgcttaagtaactctatattagatttaaaaaaattcacataaagctacatcaattctcaactgtcattagtcttaattaagcttgttaccatagggatgtttcgaagactttaatcaaaaatgattcaaatctcacttagatagagactatgataaattttatattatttaagtcgtcatttaattaacgtttattacaatagaaatataatctatagagggtgttgaaatttgaagaatgacattttgttacctaataaaattaaagtttttataagttcaaggtgtggacaaggttttgaaaggtatgatgaagtaagaaaacaactaaaaaaacttatcgaatcgacaaagattgctgatgtatatctatttgaggaaagtggagcttcgacacagtccgcagaacaggattatttatatgccctagatgatagtgatgtatgtctattcttaatagataataaagatgatgttacatctgcaattgttagagaaataactagagccaaatcacacccaaaaaagtcaatatatctattttgtaatgaaaaagaaagtaaacctacgcaaatccaagaagaacttattggagcaaaaggagctaaatattatatagttaatagttttaatgaatttgcaaatcaaggatttaaagatttaataacagacatatgtaatatttatagacactattgtaaaaatagactcatagaccaagaatttcacaattctgaacagaataaaatagaaataggttcaatagcttctgaatcactagagaaacgtattttacaaggaattgataaatcaaaagcatatatcggaaaaaagatattttctgttaataaagaagtgaaagaaacgagtgaattagatagattttatgagcaatttctaaaagtattatttggtgaaaaaagtattgaagaattcaatggggatttatttttagagcaaataaaaaaagagcaaagtgataatatgcatctagtagtaaaattaagatggaaagctattcagttttactggctcgatgattttgattctgtattaaaatacttaaaggaagcttttgacttatgtaaggaaagtgggttgcctgattggatttcacaggatatactgatagatttaataaatatagaaaatcaaaagttaaatcaggaaaataaattctcctctaggaatgctgcacaagaagagttagaaagtatgcgtcaatctctgttttacccatcaattgatagatatgaaaagctattatataaagaaattaataaagcatcaacaaaaaagaaaactgaaactgtgtatactgttaaccttggtagtaatttagatgtttatattaaatatttgactaacatttatattgttggtgcctttaatggatctttaactcaattattattattgagaaataaaataaaagatatatcatttcaattatgtgaggaatattccaattgggaattcagagtgttgctgttaaaaatggcagtaatagttggagatagcaagcaaacagaaaatataatttcctactttaatagcatattaggaaaaatcaattatattgatgtaaaaaatatttataattttacaaactgcctcccggtaaaatcagaaagaataaaatctaagctagaagtatttaaacatttagggtattattttagcgatgaagattacatgtgtatcaaaagagagttattggaagagattcataattatattgataatacttttatagtgtctatgggaaaattaatatttgattctttgaaagaaaatatcaatagaatcgaagccgatgaaatatctagagtatgcataaaaattttagaaaaaaagatgtttcgcttttatgatgatgctttaaatttgataggaataataagttttaaagggatatctactcaaaaccttgaaaaaataaagaatttgttgaaaggaatcattttagattctaatctagcaaaccagtgtcataacctcttatatgcaattataaatttaagaaaacagataatagcgggtacttcggaattaaatcaagttgtattaagtaacatgtctgaatcagatcgcaaaatttataatttagaaacatctagtgtcaaaagagaaagccatattatgagttatgttcaggagatcaaggaacaaattgagaaacaaggtaaaaatgggatttacagtgtgaaagcgcaaaacccatatctaataatccaaaatatcattaaagagggttgtgaaatagttgataactatctattaaatgaagttcttcaagtatgtaatgaatcgttatgtgcaactaatctactgtattctgataaggtgagtgctttacaattaactatttatattaaacagaatttccaaaatattgattataattttaaagatttatatcaatatttgattaaacacgaaaaccatctctttgaaggaaaagatgatctttttcaaaaatattcgacattaaccgtaaagattaattattttatgcttaaaatggtatgttgccaactagataatgttgatttattaaatctattaagtgaaattaataatgaggatgagtttgaaaaaatccaatgcttaaaggccattataaatgctataaataatgaatcatttaaaaatatagaatcagatattcgtagtatcattattcaattcactttaagtttgaagaatgacaaaaatcaagatatacggtatttatcaattaaagcattgctaaaaatgataacaaccaaaactcaaaaagttatactgactcagctttcacaatctatggattatgaaaatgtatatataaaaaatcttataataggaaactttgaaaaattagcaattatagattccaaagttaataatttaatattgaagaaagcttccatagataatcattatttggttaggacagaagcacaaaaatatatacagactagagcaattaatattactcaataaacttgtttagaaaaaaagagataataaatgtgaatcaaataatttactttcaaatttgaaaacaaattattaaggagtaaatacatgaaagaagaaatgattttaagaaaggtgatttattttttatcaacggcagaaacaccaagggaagtatttttagtatggaataagcacaaggaacatttaaaatactttaagttgagtataaacctagataattatgataaagatactttcccggttggattgggagaattggtaaatgcagttgatcaagactttatttcttactttcaaaccggaaagttatattacatggatgatgaattactgaatgatatgttatttaatggaagtatatcatttcctattgactattctgtgatgttagatactaattatgctagttatattcctcgctttttgaacaatcaagggagtagtgaatttgagaaagaaagtatttacaaaactatagatactctactaaaacataaatttcattatgattataatttctatttagtagaaaattataataaaattattaaagataatgggagttttgatgcttctataaaaaaacatagggatatgtacgagaatttagtatttttagagctatttaaaagcattgataatgatatatacataaataagaatattattgaataccaaatttcgaagtttgaggctatccaaagagtagacgatataatatataaattatataaaactagggatggtaaaagttcattaaagaagttcttagatatgcatcagaatttaacattacttctgatcggaattatcaaaatacagttcagttcaaaaaaaaatgcaaaaaataaaatgattaagttacttgaatatgtccaaaataaagtaggaatttattatgaaagagaaatggttattgcgcttaaatatttcaagaatcctaaatctgttgggatatttaataaaattaataaaggtggtaatcaaaaaaaattactcgaaaaaattgaaaacacagcttgggattttatggctccgagggtaatggaatatttctctaacttgaatagtgaaggaagatattttataccatttttcttatcccacgacaaaaacttgagagagcttttaactttatttgaaattaaaggggttttacaagatattagaacgggtcagttaataccattcacaaaaatctcaagtgctgagctctttaaaaatgaaggagtagaaatagatctttctttctattctcaggaatccacaaataaaagacgattaatatatgaaaagaatattaacgaaggttttagaattctgcaagatgaattctctgagttgaatgacataatgaattaattggagcctctctatattattttacatttaatttttatgttattttatatagcatgttaacagacctaggtataaaacgctggttttgttaatccctctgtgctgtataggcaataggataaacacattattattcctttgcggggaagttatataaatgcatttgctaaaagtgaatttaaagtgattattctactaaccgtacaagaaaataatacccatatcgcagtaaactgtgacggctaaatatttctagggagataaagccttgagtttaatcaatcggatgctcttatgtcaaaggaaaatactttttatataaagactcggtaaaccaagatcataagtcccgattatcttgtatagcaggccgatttgttgtcaatattcgatttactatgaaatcacttgttggcttatagtgaacaaaacaaaaaaaccagatccactaaaatctggttccccacagctgattagaagcaacctactgttgcttctctttcaccatctttataaagagaaagaagacaatgaatacaataaaataattcaatggattcttaacgatacttatctccagcgaaatctgtaagagtatccagagaatgaagatggctagtattgaaggaatgatgattttgtacatgtcgaccaccttccatagttagtaaaagaaaggggcgcgggccctttttttttcatgattaaaagcaagatgcggcagctcccgtcattgcaccgccaacagcgccggtaattgctccgacggcacccgctcctactgttccgatgccgggtattgtgactgttcctacagcagctcctgcaagacccagtgtgccgccgccagttaccgcaccgccgccagtacctagaatacatttcccgactgattgggtgctgattgacccgcttgtttttccagcgtctttgtttacgactttgactaaaacgccatttttgattttttcatatttcagtgtaacggggtcaccatttttgtcagtagagcttttcggaagagcctgctcctcgcccgttatgttgtcttttagggttgcattgcctttagcgtcaatatgaacatctgcatgattgaacgtcatcttcagctcactgtcgttgaggttttcaactttgtatgtagcttgggaacctgcggcagccgcagcatgaggtaaaaccgggagggcaaaggcacctgctaggaataccaaggctgccagtttcactgcggttagcttcattctgctttgcataattgatcctcctcctttggttgccatactaacaaaggcattctgcttgttaaagccttaccatataaaatgataaaaaattcacccaatttcatcacattaaccaacaaggtttgtatgtttcccttcgaaagtcataggagagcagggttcatatctgatgcgaagttatcaaggaggatagaaaccgtaaagaagagctcagagaagcacctttattgcgaacaacagcttcttccgcattttccacacgacagtataaatccctttccgtcacggaaacctagtggaaaaggtttctgaaaggagggggcgtatgatgaaaagtgaaaaaattcaaaacaaaacatctttggtttggaagatggcgattgcctctgcggtttcttgggaagcggcaaaactggcgggctctgatcacccctatttagcgcctctgtctgttatcttatgtttgcagccaacgatagatcagtcgattcgtttttcttttcatcgtattgcgggaactgcgattgggatcatgctaacgtcctttcttgtcagtcacttgccaatgaatggctggatgctggggctgttcctattaggcgggacttacattgcaaagtggttacgaatagatgtaacggttctgcatcaggtagcgctcaccattttattggtctttacgtttgaacgaaactctaaagattatgcattcgaccgaatcatcgatacggtgatcggcgtcatcatcgccattctgattcacatgttcctttttccgccggactacacaaaaaaggcagcggactcttttcaaacattggcccgtcagctttccgacgcactttcagacctttccaaatgggtgcaatcagagtggggacaaggaaaagggaaccttatggaatataaaatgaaccatcttctgcaggagctgcatacggcaaaagagatgctgcaaacagcctctgacagcttaaaattcaaccccgtcagaaaaaaacataaaaacatcatttcaagctatcaaatagagatgcaaaagttgaacgccggatttgagtatctgtcaaatatagtgaaaacgttaaaagaatgggaaaaagaaggagctttatcttcaagtgataaaagggagctggggaatgatttacaagtgttaagtgaatacttttcggatcttaaaggcatacagcagggtgaaacagacaatcggaaacagaaggaacagaacgtgttattggaatctctccgctccgacatgctgtcgcacccgccgcccggtcataaggtctataaagactctttttttttagaaacgaagaaattgctgaagcgtttgtaatgttttctggaaaaagagaatacggatatacagatatgatcaggtaaaagcgggggacatgagatggatgatatacaccggattttggatgtcatcgctaattctaagaaagctaaggtactggctaccatcattcaaacagaggggtccgcttataagaaagaaggggcttcgatgttgattttagaggataaaacaagagtcggaatgttatccgccggttgtctggaagaagatctcgttgaaagggcagaacaggtctggtctgcgggagaaccgttgattgtccgctttgatatgagtgcggaagacgatttatcctggggacagggcattggctgtaatggtgttttgacggtgttgcttgagcctgtaaaaggggaattggaacggcatctgatgacagtcaagacatgcttagatgaaaaaaagtctgtgacccgaatgaagcgattcactgaaacgttagagccgaaggaagatctgtatatcgctgaagacggcagcgtgtttggaaccggggatgtgatggaacaaggccgtattcaaaaactgagacagacggagaagggaatcaaaagggatgaacatacatctgatttgttttttatccatcagatggtgccaaaaccttgtttatatgtcttcggagcaggagaagatgcgaggccgttagtttcgttggcggctcgtgcgggctttcatgtgacggtgattgactggcgtcccgccttatgtcatcacggccattttcctgaagccggccatttgataacgggagcgcctgaagaagtcatgaaaggcctgagcatgacaaaaagggattttgttgtcattatgacgcacagctttcaaaaagatcagatcattttacatacattaaaaaacgagaatgtgttttataaaggcgtattaggccccagaaggcgtacggagcggcttttaggcgggggtgagattccggaagatatacattcccctatcggacttcccatcggggcacaaggccctgaagagattgctgtaagcattgtcggcgagatgattcaaaaaatgcgaaaacaaaggtctcgcctatgaaaacagcaggcatttacctggcagccggtacaagcagacgcatgggaacggataagcgaagtttatttctcaatggcgtttccctcggaagtatggctcttaaaaatgccttgttatctgaattagatcatatttttgttattacgagaaagggagattcactgcattggctttcggattttttctttttagatcccatgtcaaataagtggagccaggcagaatgtgagcaagcgggtaagggccaaggccattctatacaatgcggtttgcaaaaagcggcagcgtacgaggctgacgccgttatcattctccttgcagatcagccgtttgtcaccgcagatatcatcaatacgttaattgattcctatcaaaaagagcgccgttattcatttatcgccgctgaaaatcagcatcttcctatgccccccattttattctcaaatcaatgtttcccggtattgcatcagttaaagggagatcagggcgcccggcatgtgatccgtgaaagtatgatcaatatgggaaaaatgatcagctttcaagaccctttgcttttttatgacgtcgatacagttgaagattatacgctgctgctgaataaattcggggagtgaatgagttggagtatatcgggaagagtgtcattcggaaagaggcccttgaaaaagtgacgggtaaagcgaaatatacggatgattttcaagaaacagggacgttgcacgcaaaaatgctgaccagtccatatgctcatgccgatattgtgtcgatggacttttcagaagcttggaagattcccggcgtgagagcgatattgggggatgaaccttttccgcttgcaggtgaagaaattaaagacagatcgccgattgcttataaaagggtcagataccatggtgagccggttgctgttgttgttgcggaaaatccgattacagctaaaagggccgcggatgccatcaaagtatcctataaacctcttcccgtcgtcaattccccccgtgaggcctttcaaaaggatgcgccgctcgttcatgaacatgcggaccgctatgagaagacaaaaggtgtattcccggttccgaagacaaatatcgcaaacgtggataaggttagaaaaggaaatattgaagacggatttagggaaagtgatgtgacagcagaattccagatttcctttaacccttctgatcacgctgcgatggagacaagatgctcgatcgctgaaattcgggcggatgaggagattatcattaccacatcctctcaagccccttttgccattaaaaaattaatgcagtggtattttggaattgaacccggaaaggttatcgtcaaaacgcctttagtaggcggggcgtacgggggaaaagcagccgttcagttagaggtgattgcctatttggcatcaaaagcagtcggaggccggcccgtcaaattgtttaatacgagagaagaggatatgatcacatctcccgttcatgtaggattggatgccattgtcaaattaggggccacaaaggatggaattttaaaggcggcggacattcagcttttatttgatggcggagcatactctgataaaggagtggacatcagccgggctgcggtggttgattgtacgggtccgtacgctatcgaccatatatcgtgtgattcatattgtatgtatacgaatcatccatatccaagtgcattcagaggctacagccatgctgaagtgttatttgcttttgagcggacgatggatgtattggcggaaaagctgaacatggacccgttagaacttcgctataaaaatgccattcgccccggtgacaccacaccgactcaagttcttctcaattcaagcacggtcggaaatgtaccgaaatgtattgaaagattgaaggaattaatgaattgggacgagggacagcgaattgaaatcgacggccggaagatacgggcgaaggggatcagctgtatttggaaaacctcaacatttgatacaaatgcaacgtccggagtgattttaacctttaatcctgatggaagcattaatttgatgtcagggatagtggagattgggacagggacaaaaacagtgttagcccaaatcttagcggaacgaatgaaaatggatataagcaaaattcacgtaaaaatgcttgtagatacacaaacaacacccgagcattggaaaaccgtggggagcagagggacgttaatggccggaaaagccgtactgaatgcagcggaggaagccattcgaaagctgaaggacgcggcatcatgtgtgttgcgagttcctgtcgaggaattggaagtggccgacggaaaggtttattttatagatcatccttctgtacatgttgacataaaagacattgcttacggatatacgtttccgaatggaaataccattggcggccaaatcattgcgagcggcaattacacattaacccggatgacgaatttagaccgggaaacgggaagaggaaagccgggacccgaatgggctgtaggtgctcaggggattgaagttgagttggataaacgggattatacgtaccgaattacaaaagcctattctgttgtggatataggaacagtattgaatgaaaaagctgcaaggggtcaagtgatgggggggatgagtatgggaatcgcattcggaggaagagaaacctttgtatttgattcatatggcagagtattaaatcctcagcttagaacataccgcccccttcactatggagagcagcctgaatatatcattgaatttgttgaaaccccgcatgtgattgcgccttatggagcgcgcggcggcggggaacacggactgctggggatgccggccgcattgggaaattgcctttccgccgctttaggtgtccaattgaatcaacttcctctcattcccgaacaattatggaggacgcaagaggggtggaaagatgataccgtttgattttgattattttaaaccgaagaccattcaagaaacaatcaatctatttcactcgcttgcggccgaaaagaaaacaccaatgtattattccggcggcacggaaattatcacgttaggaaggctgaatatcatctatacggatgcggtgatagacatgaacgcgcttccgggatttcaaaccatccgcttttatgaacatgaactggtgatcggagcgggtgtgtcattaacgaaactggaggaagaaaatccatttccgctattaagtaaaacagtaagtgaaatagccgatcggacgactcgaaataagatcagcctgggcggaaacatttgcgggggcatctactaccgtgaggccgtgctgccgttgctgatttctgatagtttgctagggattgcagggagagcggggattcattaccatcctataaataaagtatttaacaaggaaatacaattgcaaaaaggtgattttttatttcatatcgttgtcgatcgagcgtatgttgacttgccatttgtcagtatcaaaagaagacagcagtggaatgtcggatatccattggtgacagtctgtgcgctgaaaaaagatgatgagatcagaatggctttcagcggcgtatgtccatttccgtttcgttctgctgaaatggaggctgtgcttaacgataaaagctattcattagaagatagagcgcgcaggtctttacagtatgtacccaaacccgttcttgatgatgcggaaggctcaagtgaataccgaatatttgtcttgcaacatacaattttagatgccttacgggaattagaaggaggtccaaatgtctgatcctattacgttgaaagtaaatggcgaggaaagacagatgacggtcagaccggctgatactttgttatttgctcttcgtcttcgtctcggattaactggtgcaaagccgggctgcttaaatggggattgcggcgcctgtacggtattaacggacggggtgccgatgaaatcttgcttaatgcttgcggcagaaggggaaggaaaggatattacgacaattgaaggactgatcaatacgccgattcaaaaggcctttattgaaaaattcgcgtttcaatgcggttattgcacaccgggttttctcatgaattgtcatgctttagtgaatactgagccgaatgcaagtgatgacacgattaaaaattggctggagtccaatatttgcagatgtaccggttatcgggagattgaagaagcggttaaatccgttttacgtatagggaaagggactcattagtccgtaaccgtaaaaaaaagagcccagagaatcatctctgaactccatattcttcacttcatataccgatactcccgcagtttctccaaaatcgccacttctttcatcagttcttcaccgacgtttgtttcttttactttcttccgctccagctctttgtcgactaatcgtttcactgttaagacgtcggttccggtgctcagcacttcggccttggagttaaagtgtttatgggcgacgagctgcataccgtatgagttgtataagagcgtgtagccggcgatgcctgttgtggattggtaggctttggagaagccgccgtcgatgacgatcatttttccgtttgccttgatcggatcttcgccttcgatttcttttaccggtgtatggccgttgatgatatggccgtgatccggattgaggccgaattccttcaggatgtttcggcaggttgcctcgtcttcacgcaaatagtaatacgggtttttcttttctttatgcgtttccttctctttaatgaaataccgctcaaaggttgtcatggcccgttttccgaagagggaggagtattcgcctgtccataagtaccacgtcatatctgtcgccagatcatcggtttcttccggatgggcaaacgcttcccgtaagaaccgttcaaatacatcgagcagctcacggcccgcataagctttatcctctatcatcatcgtttccatgctgccgttttcatcgacgggaatacagccgtgaatcaacaggttgccgttatatttcagatacaggctgccttttttcatcataaaattcatatggcggcccagcttttcggagtgctggacagaaaacagcagcttgtccatgacttctgcttcttcttctagcagctcgtcaggctgtttgggattcaccgtcgcaaagcaggtgttttccagttgatacgtttttccgttcagcgtgatttcattgcggtcataatcgatcttttccagtaacagccgttcttccatattaaagttcggccgtctcttaataatcgggctctcaagcttgaattggatcatcgcgatcgcctgatgaatttttgtgatttgtttaatctcatcttccggtctgttttcgtccgctttcgggcggaaagacgggttatcatcgtaatatttttcggcaaggttcaatagcggtctcagattgatgccgtaaacgtcttcaataatatccagattgtcatagcgggcacagatgcggataatatttgccaggcatacttttgagccggaataagcgcctatccagagaacatcatgattcccccattgaatatccactgaatgatagttgatcagttcttccatgattttatccggctgcggtccgcggtcgtaaatatcgccgaccacatgcagatggtcgaccaccaatcgctgcgtgctgtaggcaagaccggtgatcagcttatcggcctggccgagcgcaatgatctgttctatgatttcggagtagtattgttccttgttggcggcttgttctgttttgtacagcagctcttcggaaatataagcaaattgggcgggcagtgctttgcgcaatttggatcgggtgtacttggaagaacaataagaaacgagcttaatcatccgatgaatcgtttctttataccactcgtttaatgcctctttcgtatcaaagccatgtttgatcagcttcagtttgtcttccgggtaatagaccaaagccgccaattcatcaatttctctatcgtaaatgacgccgttgaaaatatcgcggatcttctcttttactcttcctgaaccgttccgcagcacgtgctggaatgcctggtactccccgtgcagatcactgacgaaatgctcggttcctttcggcaggttcagtatcgctttcagattaatgatttccgtgaccactttttcttcacaatcgtatttttgtgcgagcagatctaaatatttggtttccaatctcgtccatcccctttttatttacgagcaattgtatgataaagtgaatttaaagtatgacataatgtttaaatgattagaccttatatgatagtaccgcataacgcctttttgagacaatgaaaacggaagatacggcgcttcaggcatcaaaaattggaccgggataacgctgtgagcgtatacccctgttgacaatgcattcaacttccattaaaataaaaagttagctgatagttatttctatcggaaactcaatacgtagcaggctatgattgctgtgggtcgcactacagcaggagcggcttctggagagaccgcgggttttccgcggcgccgaagggttcacaatctcaggcaaaaggacagaagagtaccgaatatgtatttgtcatgctgttgattgtcagcggcgcaaatataatttgatattcttatgaccatgagattggagggcatccaatctctttttttattggctttttttgctcgtcgttcactagagaggtaaggaggagtcagatgtggagcagcgagagctaaagagggacttatcgaatcggcacgtgcagctgatcgctattggcggcacgatcggtaccggattgtttttagggtccggtaaggcgattcagctggcgggtccttctatcatctttgcgtattttattgtaggtattgcgctttttttcgtcatgagggcgctgggagaactgctgttatctaaagcggggtaccaatcattaacggatatagccgaggcgtatttagggccgcgtgcagcgtttgtcaccggctggacttattggttttgctggattatgacggctatggcggatgtgatcgccgtcggtgtgtatgtgaaatattggtttgatattccgcagtggattccggcacttatctgtttgctcattttattagggcttaatctgttaacggttaagatttttggagaattggagttttggttcgccttaattaaggtagtcacgattctcgcgttaattgtcatcggggtggttctgctggtgattgggttcaaaacgcataccggaacggtttcagcggcgaatctgtgggagcacggcggcttgttcccgaacggattttcaggctttttgctttcatttcagatggtgatcttcgcctatgtcggtgtggaattagtgggtgtgtcggcggcggaaacgtcaaatccgaaaaaaaatattccgtccgcgatcaataaaattccattgcggattttatttttctacgtcggggcattgatcattcttttatgtattaacccgtggatgcagctgaatgcaacggaaagtccttttgtaaagaccttcagtctggtcggcattccgttagccgcgggaatcattaattttgtcgtattaacgtctgccgcttctgcttgtaacagcgggatgttttcaacaagccggattctgtataacttaagcaaaacgaaacaggcgccggcaagttttgcgaagctgaataaaaatcatgtgccgagccgcgcgttatggatatcggttattgtgctgtcagcgggcgctcttttaagcaaattgataccggaagcggcctttggcatcgtgacaaccatcagcgcgatctgtttcatttgggtgtggggcgtgattcttgtctgtcatatcagatacaggaaaacccgtccggacttacacgcaagctcgtctttcaaggcgccgtttgcgccgtttatcaattacgccgtgctggcgctgtttgccttcattctggtgattatgctgtttgcggatgcgacgcgcccggctttgctgctgacgccgctgtggtttattggattgtttcttatctatcgggcgagagggagaaagacagattgaattacttcagacggtgtactgccatgcagtatgccgttttaatataaaaaaagcgctatcctgccgtgtaagcagggtagcgctttttacattaattccggatcaaataatcaaatgcgcctaaagcggcagttgcacctgatcccatggagataatgatttggttgtacgggccgtctgtgcagtcccctgcggcaaataggccgggaacgcttgtcgcgccgctcttatcgacgatgatttcgccgatgcggttgcgttcgacggtttcgtctaaccattctgtattaggcacgagaccgatttggacgaatacaccttggagttcaacgtgtttttcttcgcctgtttcacggtcaacgaacgtaatgccgtttacgttttggtcgcctgtgatttctttcgtttgtgcatttttgtgcacagtgacgttcggcaggctgtaaagacgtttttgcaggacttcgtctgctttcagttcaggcgcgaactccagcacagtcacgtgattgacgatacctgcaaggtcaatcgccgcttcgattccggagtttccgccgccgataacggctacgtctttgccttcaaataatggtccgtcacagtgcgggcagtatgcaacacctttgtttttgaactcttgctcaccaggtacgttgacattgcgccagcgggcacctgttgaaaggatcactgttttacttttcagtacagcgccgttttcaagttcaagttcgaagaggtcttttttctcaaggcgtttcgcgcgctgaaggttcatgacgtcaatatcataatctttcacgtgctcttcaaggcttgcagcgagcttcggtccttcagtcgctttgacgctgatgaagttttcgatgctcatggtgtcgagtacctggccgccgaagcgttcagcgacgacaccggtgcggatgcctttacgcgccgtgtagatcgccgcgcttgcgccggcaggtccgccgccgacaacaagaacgtcaaacggctctttgtcggcaaactcagacgcatctgcgccgctgcccattttcgcgagaatctcttcgatggtcatacggccgctgccgaaagattcaccgtttaagaaaacagtcggaacagccatgatgtttttgctttctacttcttctttgaatgccgcgccgtcaatcattgtatgtgtgatattcgggttgagcacactcatcatgtttaatgcttggacgacatcagggcaattgtggcacgtcaggctgatataagactcaaagcggtattctccgctgatgttcttaatctggtcaatgaccttttgatcagccttaggcgctctgccgctgacttgaagcaatgccagcactaatgatgtaaattcgtggccgagaggaacaccggcgaatgtaacgcctgtgtcttctccggtacgattaacgctgaagctcggtgttctgtttaattcagttttttcaactgaaattttagatgacatggaagccagttcgtcaacgagagccagcatgtccttagaagtgtcatcgtcaccggcgcttactttgagaacaatgtcgttctcaattagctgcatgtattgatttaattgtgctttgatatttgcatcaagtaccaatggaatgcactccttagattttacctaccaaatcaaggctaggtgtaagtgtttcgccgccttcttcccatttagccgggcagacttcacctgggttttgacgaacgtattgagctgcttttactttgtttactaggttgcttgcgtcacggccgataccgcctgcattgatttcaactgtttggataacgccatcaggatcgatgatgaatgttccgcggtcagcaagaccagtttcttcgtcaagaacgtcgaagttgcgggagatcgtttgagatgggtcaccgatcattgcgtaagtgattttgccgattttttcagagctgtcatgccagcctttgtgtacgaagtgagtatctgtagaaacagagtatacttcaacacctaattctttcagtgcagcgtattgtccttgaagatcttcaagttcagtcgggcaaacgaaagagaaatccgctgggtagaagcagaaaacgctccattgacctttcaaatcttcgtttgttacatcgatgaattcaccgtttttgaaagcttttgcttcgaatggcagtacttcttttccgattaaagacataatatcttcctcctgaaatgtgatttgaaatatattaaaaagacaaagcattcactttatctttcaataataattctaattatatatagattattaaataacatttattttttgtcaagctatatggggtattattttctgctttttttgctttagacgttaaaaaacgcctggtataagcggtttggcgctgtttgtcatgtttagcgccgggcgaaagggggattctcaattggtgaatcgaaacagtaggaatcaacccctctatatggcagtataaaccaaagggggtatgatcatgcaaataaatcacattactttgtacagttgtgcgttggaggagacgaaacacttctatgaacgggtgttaggttttcctttaattgatgagtccggggattcgtttaccatcaaggcgggagaaagtgagttggaattcaggcgcgccgattctcactctcaaccgacgtatcattttgcgtttaacattccgaataatcgttttgatgaggcgaaggcgtggataaaggataaagtcgtttttcaaacggaagatggggaggatgaggtgtatttctcccatattcaggcgcgttccttttattttaaagatccgtccaacaatctggcggaattcatcgcgagagacacatcgccgccaagcgcggaacgtttttcgattgagtccgttctgaatatcggtgaggtgaatctgacggctgccgaggtggtatcgacggggaaggagctgcagcgtctcggcattccggtgagaaagcatgcgcctcttagtgaaaacgggtttcattttatgggtgattacaatgatggggcgtttttgcttttagggccgagcggccgccgctggattttttctgatcagcatgcggagttccatccgctgtctgtcattgtgaacgggacgatccgcattgaggctgacggagaaggcggcattgacatcaggcgggcacagccgtcataaaaaagcccgggctcaaaaggcccggacttggggacattatttataaacaacccgggtgctgcacatgatgtcgtgcagcgtttttttctctccgaaggcacccatgatgaatccgatataaagaatgagcttggatatgatataggcgaaatgatataggcgaaagcgcgtccgaaggcctggccgatggaaatgcgtccgccatcttcattgacgaccttaaggccgagcaatgcttttcccagggtcccctgcatctttgaggctgtgagcaggctgaaatataagatgctgatcacaatagagctcacaagaatcggaatgacgccgaacaccagaaaagagatgttaaactgattttcggtcatgaaggggtcagccgccgcaacgcctgccgcaaataaaaaagagaccataaattgaatgataaaaatcggaattcctatgatgatttgatcaatgacgtaagccagaaaccgaatccaaaatcctgccggtctttccatgtatctttttctctcccttgctttaatctggaatattatacgtaatcattccggattttgcaatggagcttaagcttctgcgagcagcctctttccccatgccaagcgtcccatgatcagcccgaaagccagaagggcaaacatgatgccgcaccacatcagctgatggattcccaaatgtgaaataaaccagccgcccgccgccgttccgatggtgatgccgaggttggaaaaggagacaaacaggctgttgccgaattcgggcgcctcctttgcttccgcagtaagccatgtctggctgacaatgagaccgccggaatgaacggcgccccatacgaagacgaggacggccatcggcgcgaaagacgtcccaaacccgtatatgagcaagtaggcggctgtataaagaagcggaaacaggatgacggtctttttcatatttttatataacaaagcaccgaagacgaaattcccggctatcataatcaccccgaaactcatcagcatgaagctgacccatgtgccgatcatatgggacacccgcccgaggtactccgcaaaatagctgtagacagaaaacatggccgcaaagagacaggtgacggcagcgatattgagccacaaagccggtttgcgaagaatgccgagctggcttctgaaagacattttttctgtgaccggcatggatggcaaaaagagaagaatgcccgtgaacgcgatgagactgatgatagcgccgaataagaaggcggcttcaagagagagacgatccgccagataagacgtgaaaggcacgccgaacgcaaagccggcggtgatgcctgaaaagactttcgttacggcttttccggattggccggcggggacaagccgggccgcggccgcaagcgctacagaaaagaacaccgggtggcataaagccggaatgatccgaaacgccagcatgacactgaaatgcgccgtatacgcgtagaccgcatttgaaacggcaaacatcagcaccgctaaaagcagaatgtatttccggtttatacctgaagcaagcaaggtcaaaaacggtcccgacacagcgacgatgaacgcgaaaatactgacaagccaccccgcttttgaagcagaaatatgaaatctgtccgccacttgcggaagaacgccgataatgcccatctcggtcgtgataatcccgaaaacccctagtgccaaaaatagaatgaagatggagctgctttttttcattgttatgtatgcctccttttatttaactacatatatagaaaaatagatatgttagaacaaaaaaatccctcctttcatggttatagctggtgctggacatagtcagcaaaggctttaatttgtttttcatttcttctgtaataggtccactttccgattcgttcggattccagcaggccggctttttgcatcgtcagcaggtagctggagatgacggactgcgcaagccctgactttgcctgaatatcaccgacgcaaattccggtgcggaaactgagtccctgatcaagataaggtctttcatcaaaatggtcttccgggtgtttaagccacgtcataatatcacttcgtgttttgttagataacgctttatgaatcaatatcggttccataacgtttattatatctatttttctggatttgtaaattcgtttttgacaaaacattctcaaattaagtaaatatcgtgctaaaatataacatattatcagattaccggtaaaaaagccgggttattgtcaggaggatattcacatgaatcaaaagaaaaaaggtgcggttgcggtgaccttgctttccgctctgatgttttgtttattgccggtcctcgtctcgctttctccgcttgcagaaacggggccgaacgcgaatcgttttaattccgcgggcatgtgggccgccgtcggtcagatccttgttatatatgcggtcccgctcattatgtatattctcggtgttcgtggcatgaaaatcatcatggctgttttttgcgggatcgggcttatcatttgcgcggctgtcttgttggtggcgttattgaccgcaatttccttagggcaggagctgtctctttattacggtcttttcgtttggtcaggcgcggctttcatcgtcaatgtggtgtggtatattgccgcgtttcgatcatccccgaagcatcagcaggctatgtgacatttgttctataaatctaccgaaaatacaaatatttcataggatgattatggtatgatgaaagcggtatagcagtttttaatagaaacgggaggaactgacattgaaaaaaaagacagcttcattgcgaatgaaaacattggcggccggcgctgcggttgctgcggctttatctgtgggggcggtttctgatctgccgggggcaaaatggctgcatccggcggctgctcaagccgcggaaacggtatttaaacaaaatcatgcggcatccggtttcttggcgggacggtatgacgcgcaggcgatgtctccgacgatgttcaactggtcaagggaaagccggtttacaagcactgccgatggcgcgttaaaatgggaaaagaatgttccggccacccctcaaaacggtgcgggagccgcggttgacggggacggcacagtatttattcaatcaaaagacgggaagctgacggcgtatcatccggacggtactgtgaaatgggtgacggaaaacctcgggacgacctatacgctgactccggtgctcggaacaaacggtgtcatttatcttccttctcacgataaaaaactgtatttcatcgacaaagaaaccggaaacattttaacatcggttccgctgagcggagcgccgagttccgatgcggctatcggctctgacggcacgctgtatgtgtcgacgctggataactatatctatgcgattaaaccgacgtcgccatcgacatggacgcaaaagtggaaatttaaaacaaacggcgtggtcggctccgctcccgtgttagcatcaaacggcactctgtatacggcaacgtacaataatatcttttacgcgatcaattccggaacgggccaagtgaaatggtcaaaaacgacgtccaacgggtttaaaggttatccggttattgatagagacggcaccgtttacgccggaaaccaggacggcaacttatacgcctatacatcaacgggtgctgtaaagtggacgttcccgttaaacggtttctccagctcttcattagcgatcgaccataacggcaatgtgtatatcggttcgggaagcggcgagctgttttccatcagcaaaaccggtaatatgaactggtctttctatacggacgggcctgtgagaacggcgccgctgattgatgcggacggcaatgtgtacttcggttctgacgataaaaacgtctatgcggttgacgctgaggggaatgaaaaatggcgctatcaaacagacagcaatgtcatttcctccccggttctggctgaagacggcacgctctacgtcggcacttatacgaaactgctcgcattcggggcaaaaaaataataaaaaagaatccgcgcacgcggattcttttttttatttagaggcttgaatgaatacgcctttttcatgagagaattctttaaaaccgtacacaccgtgatatgaaccgatcccgctcgtattgacaccgccgaacggaaggttgacgtcagtgaaatgaacgacgacatcattgacagaagcattgccggacgtcgtatgctgcagaacataatcgatcagctcctgattatggctgaatacatacaaggcaagcggcttgtcccgttcagtgatgtaatcaacggcttcactgatatcttcgtaattcataatcggcagaatcggtgcgaagatttcttcctgcatgatcttcatatcaggcgtgacgtttgtcagcacggtcggagaaatcgtgcggtcatgagcatcgaatacgccgccgaacgccgtttttgcccctttttcaatggcatcatcatacagggctttgacacggttaaagttgcggtcattgacaatctgcgtgaatttgttgcggtcaaccgtatgatcatcctccataaaacctgcattgacaatggtctgcaggagatctgtaaaggtgtcctgtacatcttccttcataaggagatagtcaggggcgatacatgtttgccccgcattgacaaatttgccgacggcgatttttttcgccgcgtccatcaaatcatagccgctgtcgatgatcgtcgggctctttccgccaagctcaagcgtgacggacgacaaatgcttcgccgctgccgtcatgacgattttaccgacattcgtgcttccggtgaagaaaatgtggtcaaacggctggtcgagcagttctgtcgcgacatcgacctcaccttcaaaaatggcgacttcttcttcgtgaaatgcctcgcgaataactgtcgcggcgatatggctcgtctccatcgtaaaatcggacagcttcacaatcgcgctgtttcccgccgcaatggcagccgcaagcggagccatcgtcagcataaacggataattccatgggccgagaattaaggtaaggccttttggctcgtacattaatacgccgtcagcgtcggggctgacggatgagccgacgcgtttcggcgccatccaggtgtcgagattgttcatattatctttaatcgccttgatcgttccctgcgtttccgctcttttcacctcatgataaggcttgcggacgtcccgtctgatcgcctcgatgatttcttcttcatgtgcggtgacggcatctaaaaagcgctgaagcttttctctgcgctgcccggctgttgaagcacgcagcgttttttgattttttttctgaagcgcaaagacgcgtttgatgtctgcttttatatgctgatccatcggttttcctcctctggttgcttttttatttcttcagggcctattataatgtgatgtgtttttgcggcaaagacagcgtaaacgcatctatacgttaccgtacaaattgccgtgatctgtctaatgaaaggagtgtctcttatgccggattctatgacaaatgacatcaaacaagcgcttttggccatgcttggagagcgggatatccgccgtgtgaccatgaaggacatcgccgaacgggcgcacgtgagccgggggacactgtacctttattacgaagataaatatgcgattttagaggatatagaggaagaaatgaaagacgggctgagcgaagcgctgtatgattcgctgaagaataaagatgtgcttcatttacagggcggatggcaaaaagtgcatccgacactgtcttttgttgaccggcaccgggtgttttttcaaacgatgatggaccgtcataaaatgccgtattttcacgttcatgcttttttaaaagatgtgttccggcatgatgtgctgctgtcaccggtcaatgcggatttctcaccgactgaacaggatatgtacattcattaccgcgcgttatacacatatgccattgtgttgtactggctgaatgaggagcccggggcatccccggaagaaatcagcggacaggtgtgggatttgatttctcaaaaacggttttactggctgtttggccgccgggtgccggaacaagaagaaaaaaagcccgccgaccgccgggtgacaaggacgaggcaggccttgcaagaagccatgatcggcttaatggcggaaacaaaagagtacgcggcgatcacgatttccgatattgcccgtcaaagcaacctccgccgtgccactttttatgaccattacgccaacaaagaagcattgctgaaaacgatcatccatcaatcatgccgggatctgatcggattattgacggtaaaaggagatcctgccgactgttccgtggaagaagcggaagccgcgctcgtccggctcttttcggcgctgtccggcggccttccgctcgttcattttctgagagagggttcaggagtgcctgacgtcatcccggaaatgttcagagcgctgcaatcgttttatcttcatcagcctctgcacattcaggcgggcaaaaagctctatgcatactatgtcgcgtccatgctcgtcggtctgattcaatatcgtcttcatgaaggaaaagaccacgcgccggatatgctggcccgggagtttctgcagtttttggatgtgaagaagtatcgggtgattttgctgtgaggatgatgaaaaagaactcggccgaaaacaggccgggttcttttttgctgttttctttgagaagtgcagatatgaaagaaaccttccatatgacgcctgattagcattctgccgccaaacatgacaaatgtcatattcggggcatgatggctgctactacaaccgcgtcgggcgccccgttatacttgaggtcataatgaaaaagaagggacatgacattcatgatcaatcacgccgcaactcaaaaacaagcgtctttaaaaaagcaggttgccgcattttccggcgccgatacaaagcatagtatcattcagcttttcaacacgtttgtgccgttttttgccctttggtttcttgcttacttcagcctcaatgtctcctatcttctgaccctcgcctgtactgttatagcagcgggatttttgacaagaatctttattattttccacgactgctgccaccaatcctttttcaaacaaaagaagctgaaccggctgttcgggtttatttcaggtgtgctgacactgtttccgttccttcaatggcagcgaagccactccattcatcatgcgacaagcagcaacttagataaacggggcaccggcgatatttggatgatgaccgtcaaggaatataacgaagcgtcagcctggacaaaaatacgctacagactttatcgcaatccgtttattatgtttattctcggcccgatttacgtatttctgattaaaaaccgtttcaatgtaaaaggcgcccgccgcaaggagcgctggaacacctatttcacgaacgcggcgattgtcttattggctgctgcgacgtgcttgcttctcggctgggaaaactttttgcttgttcagggtccgattttccttatttcggggtcaatcggcgtctggctcttttatgttcagcacacgtttgaggattcttattttgaagccgatgagcattgggattatgtgcaggccgcggtagaaggaagctccttttacaagctgccgaagcttttgcaatggctgacgggcaatatcggctatcatcatgtccaccacttaagtccgaaggtgccgaactacaagctggaagccgctcatgagggacacgagcctttaaaaaacgtaccgaccattacgcttaaaacaagtcttgaatccatgaaattccgtctgtgggatgaggacgaaaagcagtttgtcaccttccgggaggcgcggaaaacatcggcgccccatccggtgccgaaagaacctttaaagaaaaatgcctgatacggcgcacggctctttctcttatcagaaagagccttctcttcatgcgtgagggtgcaatgaaggcggtgttttgataaagtgatggtagacacaagcagcagaaggtggaacaaagatgaagaagtattttaaatttcaaaaactgaacgggatttctccttatatatggacgatttttttcatcctgcctttttattttatttttaaaagctcttctaccttcgtcatcgtggccggcatcattttcacgctcgttttctttggcgcataccgctttgcatttgttgcaaaaggctggccgctttacttatgggcgcttcttctgatcggcatttcgaccggctcagccatgctgttcagttatatttatttcgccttctttattgcctacttcatcggccatatccgagacaaagttccattttacatcttatattacattcatatcatcagtgcggcggttgccgtcaacttcagccttgttctgaaaaaagaatggtttttgacacaaattccgtttatcgtcattacactgatcagtgccatcctgcttccgctcagcattcgaagcagaaaggcacgggagcgccttgaggagaaattagaatatgcaaatgagcgaattgccgatcttgtgaagctggaagaaaggcagcgcatcgcccgggaccttcacgatacacttggacaaaagctctccttaatcggactgaaaagcgaccttgcccgaaagctgatatataaggaccctgaacaggcccgcgctgagctgaaaagcgtgcagcagacggcccgcacttccttaaatgaggtcagacaaatcgtctcatcgatgaaaggcatccgattgaaggatgagctcggcaatgttcggcaaattcttgaagcggcaggaattgaatttgtgtatgaagaaaaagaagcgcccaaacatatctctttgctgaacgaaaacatcgtcagcatgtgcattaaagaagccgtcaccaatgtcgtgaaacacagcggcgccaaagtatgccgcatcaccattcagcagctttggaaagaggttgtcattacggtagaagatgacggaagctttcaatgcagagaagaccgctttttttcaaaggggcacggcctgcttggaatgagggaacgtcttgaattcgcaaacggcagtttagccatcgatacagccgccggaacaaagctgaccatgagaatcccgaatgattcaaaatcaaaagaaaaggatggtagcagatgatcaacatcttcattgccgaggatcagcaaatgctgctcggcgcactcggttcgctgttgaatttagaagaggatatgacggttgtcggcaaaggcacaagcggccaggatgccatcgatttcgtggaaaaacatgcgcccgacatctgtctgatggatatcgaaatgcccgggaaatcaggtcttgaagcggcagaagaactcaaggacagcggtgtgaaaatcatcattttgacgacctttgcccgctccggctattttcagcgggcgctaaaagcaggcgtcagcgggtacatgctcaaggacagcccgagcgatgagctcgtcagcgccatccgcagcgtcatgaaagggagacgcgtctatgcacctgaattaatggaggacatttatagtgaagaaaacccgctgaccgaacgggaaaaagaggtgctcgagcttgtcgcagacggaaaaaacacgaaagaaatcgcaaacgccctcagcatcaaaagcggcacagtccgcaattacgtttcgatgattctggataaactagaagtgaaaaatcgaattgaagccattacccgatcaaaggaaaagggctggtttaagtaacccgccctcagcttgttcagccagtgttttttttacactggctttttttattatctatcgtcactccgtctcttccttccacttcttatcaatcagcattttccccggccaagtgtatgccatgatgccgccgtctgcggtgatgtcttctcccgtgacgtaagagctgtcgtctgaagcgaggaagagcgcgacagccgccatttcttccggttttccgagccggccgagcggcgtgatccatttgttggcttcacggaacgcctcgcccatttcgtcttctttcgtgcctgccaatttatcaatgagcggcgtttcaattgtacccggcgataaggaattgacgcggattccgcttctggcgtaatcaatggccatcgctctcgtcaggttcgtgattccgccttttgcggcgttatagccggaacggtcaaggtctgcggcccggccggacatggaggaggtgttgatgatggagcctcctttttcgagcatgagcggaatcaggtatttgctgcacagaaatgtgccgcgcagatcgacggcgatgatccggtcaaacaggtcgaccgggtattcatggacattgccgccctcttggtcaacaccggcattgttaaacagaatatcaattgttccgtacttttgctgaatgccgtctgcaaaagactttacgttttcttcatctgatacatcaaggtgaaaggcttctgcttctccgccgttttttctgatggcgctgacggtttcattcagttcgctttcattgatgtcaccgcagatcacgcgggcgccttcatcggcgaaaacccgtgccgtcgcttgtccgatgcctgtcgcggcccctgtgatgattgcggttttgtctgttaatcttcccatattgcgattcctcctttttctatacctgttcccgctgaatagggggataaacatacggaggtttgtttctaattacctattaaatatgttaatattatgtatatacatcattgggaggtttacatattttgaagatacagcataagaaggagatagcgttttattgttatgccattgttcctatgggatttgtgatctacaccgttatctctattctgtttcaggacatcacgtttcctctcactgtaagaaatgttctgcatgagtctttgcgaaacttgggatctcttatcttatttagtttgtttttctacccgtcatacatatggatgaagaaggaattcggccgccggaaagaagcagagaggagaggatgatcaacattctctcttttttattgataaaatgggtgaaatgaatccattaacatgttaaatttacaatatatgcatctgctaatcctagttgacaattgtcactgtatatgataaatagatgctgaaaagattttacataacatcaaagcataattaaaggagagatctgaagtgcggaaaaaaaagtttaaagcagaatccaagcgattgctggacatgatgattaactccatttacacgcagaaggaaatttttctccgcgagttaatttccaacgcgagcgatgcgattgacaaaatctattacaaggcgttaaccgatgattcattaacgtttgatcaagacaattactatataaaagtgacggcggacaaagaagcgagaacgcttaccgtcacagataccggtatcgggatgacaaaagacgagcttgaacagaatctcggcacgattgcgaaaagcggttcactcgctttcaagcaagaaaatgactcgaaagacggccatgacattatcggccagttcggcgtcgggttttatgcggcgtttatggtggctgataaagtcacggtgaaaagtaaggcgctcggcagtgacgaggcgtatgtatgggagtcggaaggggccgccggctacacgatcgcgccgtgtgacaaggaaaccgtcggtacggaaatcaccctgaaaataaaagaaaacacagaagatgaaagctatgatgagtttttagaaaactaccgcatcaaagcgatcgtgaaaaagtactctgattttatccgctacccgatcaaaatggaagagacggtcaacaagccgaaagagggcagcgagaacgaatttgaagaagttcaggaagaacagacggtcaacagcatggttccgatctggagaaaaaacaaaagcgagctgacggatgaggattacgaggctttttacgccgagaagcattacggttttgataaaccgctgacccacgtgcatatcagcgtcgatggagcggtgcgctacaattcgattttgtttattccggaaaacatgccgtttgactattatacgaaggaattcgaaaaaggattggagctgtattccaacggcgtgctgatcatgaacaaatgcgccgacctgcttccggatcatttcagctttgtaaaaggcatggtggattctgaggatctgtcgctgaacatttccagagagatgctgcagcacgaccgccagctgaagctgattgcgaaaaacatcaataaaaaaatcaaagccgagctgaagagcttgctgaagaacaaaagggaaaaatacgaatctttctatgaatctttcggcagacagctgaaattcggcgtctataatgatttcggcgcgaataaagacgtcttaaaagatctgcttctcttctattcatctaaggagaaaaagctcgtcactctggacgaatatgtgtccagaatgcctgaggatcaaaaatatatctattacgcgtccggcgattcatatgagcggattgaaaagctgccgcaaactgaaatggtggcggacaaaggctacgaaattttatatttcacggaagatattgatgaattcgcgatcaaaatgctgacaagctacgaggaaaaagagttcaaatccgtctcaagcgccgacttaggcatcgacagtgacgaagatgataagcagactgaagccgaagaaaacgaatataaagacctgttcgaaagcatgaaagagattcttgcggataaagtcaagaatgtcagagcctcaaaacgcttaaaatctcatccggtctgctttgcgacagacggcgaagtgacgatcgaaatggagaaagtgttaaacgccatgcctgacagccagcaggtcaaagcggaaaaagtgctggaaatcaacccgaatcacgaagtgtttgagacgttaaagaacgcgcacggacaagatcgggaaaagcttgctttatacacaaacctgctgtacaatcaggcgcttctgattgaagggctgccgatccatgatccggtcgagtttacgaatgatatctgcaaagtcatggtatgacgccaaaaaggaatcgcccagcggggcgattccttttttgattacagtgtgcgctgtttaagaatttgattttgtttgctgcgcttctttaaggagaaccgttttttcaagtgcgtttcgatttcttctaaacttttgcccttcgtttcaggaacgatgtaagcggcaaagaagaaggatgtaaggcagatgactgagaatattccgaacacccagccgatgcccattgcgctcagcataagcggaaataccagcgaaacgatcaggttggttgccgacagaatcaatgtcgtaaatccggttgcggctccgcgtgcgtttgacgggaacagctccggcatcagaacccatacgacgggaccccatgtcgcctgataaaagacgatatagattccgagaaacagcacggtcagccaagctgttgaagctgacaggccggccagaaggagaatggctgatagtgacgccaggctcaaggtaatgccgacacttccccacatcagcagttttttccggccgatccggtcaattaagatcatggcggtgatacacatgatgacgtttaagacaccgatgcccatcgtgccgagaacggacgccgaagtgccgagtccggcctttgtaaagatggtcggcgcatagtaaatcaccgtgttgataccgaccgcctgctggaagatggcgaggccgatcccgatcagcagcataggacggatccattttgctttcagcaagccgagcgtagattcttttttctcggcttctccttgtttcatttccgccaattcaacggcgatatcctctttgtcgtgagtcatttccatgacttgtctggcttcctgctcacggccgcgtttgacgagccatctcggagattccggcataaacgcgattccgattaataaaagcgccgccggtactgccgcgagaccgaccatccagcgccaagcttcaaacggggtgaatatgtaattcacaatatatgcgagtaaaattccggttacaatcattaagttattcaatgtgccgagcgttccgcgtatttttgtcggcgccatctcagatagataaacgggaaccagcgccgttgagcctccgacggctaacccgagtatgacacgggagataatcagcatggtgacggtttgcgaagccgcacaggcaagcgcgccgataataaaaatgagtgaaaggacgaaaaccacttttctccggccccatcggtcagagcatgtcccgcttaaggcggacccgaaaatcgcaccgagcagcagcatgctgacgaccaatccctcggtcagcgtgtttaaaggaatatcattgttaataaataacaaagcccctgaaatcacaccggtgtcatagccgtaaagcagcccgcccaatgctccgaaaaagtaaatcaggtattttttggtgtttttcttcacagatgatcctcctcatcttttggaacgcataatagtttatttagataactatttcattccccgaagagaaaaatataaacataaaaaaacacgccctttcaaaaaggcgtgttatttttcttaggaaaacagcttgtcaataaacgcgatttcttcagcagatagcgtaatggaggctgctttcatgttgtcttttaattgatccgcgcgtttggcgcccggaatcaggatatcgatttcaggtctcgccaagtaccaggcaagcacgatatgcgccgtatcggcattgtgcttttcagcaatcggtttgagctggttgacttttttgatgttttctttaaactgctccccttggaaatgcgcctgatcattgcgcaggtcgccttccgggaaggttgtgttctcgtcgtatttgccggccagcagtccggatacgagcgggaagtacggaatgaatgagatgccgtgttctgtcgtataagggaagaaagtcttttccgcctcacggttcagcaggttgtattctccttgaatcacgtcgactaagccgtctttattagcttctttcagctgctccaaagagaaattggatacgccgatggaacggatttttccttcttttttcagctcattcaatgcttgaacggcttcgtccttcggtgtatgctcatccgggaaatggatgtagaataaatcgatgtaatccgtctgcagccgtttcaggctgtcttcaaccgattgtttcaaaaaggccggtgagttgtcgaaaacaaagtcattgccttcttttctatgagcggcttttgtggcgatgaagacatcctcgcggttatattctttcagcacctcgccgatcaattcttcagaacggcccacaccgtaaatataggcggtatctaacatggtaacgccgcttttaatcgcttcccggaccaattcttttcccgtttcttcattcagattcggatagagattgtgtccgccgaccgcatttgttcccaaaccgatcggaaatacctttaggtcagttttgccgattgttactttgctcatgttttcgccccctgaaaaaattggatatcatagcgcctgccgggaaaatacggcagcgttctctattaactataacgctatgccaagtgaatgtcgatttggtgctcttggcaatacttcgtatattcctcatcgagctgctgagaagtgacgatgctgtgaagccggtcaaaaggcgcgtatgtcaaaagcgtggatttgccgaatttggaatgatccgcgagcagatacacttcgttcgccttttcggaaattttctttttcacctcgtattccagtaagtcggaattcgtcaggccgtgggtgatcgttgtcccggtagcggacatgaacgccttgttaatgttgtatttattgagtgtgcccggatcatcaatgccgacaaacgaccttgtcttccgtttgtagttattgccgatgatgatcaggtcgatatttttcatggatgaagcggcgttaataatatcaaggctgttcgtcaacaccgttacattcttatccgggtcaagcgtctccagcatcgatttggtcgtcgtgccggaatcaataaatacaagatcgtgatcctcgataaaccgcgacgcatagcgggcgattttgattttttcatcctgatgttgaatggtgcggttctcaaaagggacgagcacagatttttctgctgacgtcacgccgccgtacacctttttgatcacccctttttccgcaagcttattaatatcgcgtctgaccgtgtttttagagacgttgaatacctcgcacagctcatccagcgaagtggctccgtgtttgagaatgtattcttccatctcctgaatccgcatcagtttcataaaaaaactccttctagaattcttaaagtaattaaaatatataataaacaccaagagttaatcaatagttacttaacaaatgataaaaaagagggttcccaccgtacgattcgacacggttctccaagttcctgttttcccgcttaaaaaaagtatgataaaaataatgaaaaaattttgattttttagattgacttgaaggtgtgttgggcttacaatgtaaccaagaaatgaccaaaatataacctgtaaaatcaaaagtgaaagatgtaaccgtttgctttatccggcacatgaccaacttttacatgaaaagattgggagtcaccatcattttagcatttgtaagcgtttaattcatgtcttttatatgtaaaagatgaatatattcatccgttattatccagctgaacaggatgtttactatttaaggaggcaatgagaatggcagagatcagaaaactgaaaaactacatcaatggtgaatgggttgaaagtaagacagatcaatatgaagacgttgtcaatccggctacaaaagaagtgatgtgccaggttccgatttctacgcgggaggatgtggaatacgccgtccgctcagcgtcagaagcgtttaaaacatggtcgaagacggcagtgccgcgccgtgcgagaattctatttaactatcagcagcttctccagcagaacaaagaagagcttgcccgtctgatcactttggaaaacggtaaaaacacgacagaagcactcggtgaagtgggacgcggaattgaaaacgtcgaattcgcagcaggcgcgccgtcactcatgatgggcgattcacttgcctctatcgccacagatgtagaggcggcgaattaccgctatccgatcggggtggtcggcggcatcgcaccgttcaacttcccgatgatggtcccgtgctggatgtttccgatggcgatttcgttaggaaacactttcattctgaagccttctgagcgcacgccgctgttaacggaaaaactggcagagctgtttgaacaggccggtctgccgaagggcgtcttcaatgtcgtgcacggcgcgcatgacgtcgtaaacggcattcttgagcatccggagattaaagccatctcattcgtcggttcaaaacctgtcggcgagtatgttttcaaaaaaggcagcgaacatttgaaacgcgtgcaggcgttaacgggcgcgaaaaaccatacgatcgtgttaaatgacgcccaccttgaagatacggtcacaaacattatcggcgcggcattcggttcggcaggagagcgctgcatggcatgcgcggttgtgacggttgaagagggaatcgccgatgagtttatggcgaaattacaggaaaaggccgcagacatcaagatcggaaacggactggatgacggcgtgttcttgggcccggtcatccgcgaggacaacaaaaaccgcacgcacagctatattgaaaaaggcatcgaagaaggagcgaaactgctttgtgacggccgtgaacatgtaacggaagacggctatttcgtcggaccgacgatttttgacaacgtgacgacggatatgacgatctggaaagatgagatctttgcgcctgttctgtcggtcatgcgtgtgaaaaatttaaaagaagcggttgacatcgccaaccagtctgaatttgcgaacggcgcctgcctgttcacgtcaaatgcgaacgcgatccgctacttccgtgagaatattgacgcgggaatgctcgggatcaaccttggcgtcccggcgccgatggcattcttcccgttctcgggctggaagtcttctttcttcggcacattgcacgcaaacggaaaagacagcgtcgacttctatacacgtaaaaaagtcgtgacggcacgatacccgtctcctgacttcaattgatcagacagccggcccggacggctttgtgattccgtccgggttttcttttaccatccattaaggaggaataaacatgagtcatttgctgcgcaaaccgcaggccgatgaaatttctcaaggcgtgaccatcatacatgacgtcacttcagccaattcagacctcaaatacgtcggatttaaagtcgttgatctcgctcccggctcaacctatacagaagatttgaaaaagacggagtgctgcatcgttgcggtaactggaaaagttaccgtcactgattatgatcagacatttgaaagcatcggcacccgtgaaagcgtatttgatagaaaaccgacggacagcgtttatgtgtccaatgaccgctcttttggaatcacagccgtcagcggggcgagggtcgcgctgtgctactctccgtccgaacaccagcttccgacaaagctgattaaagcggaagacaacggtgtggaacatcgcggcaagctggcaaacaaacgaaccgttcataacattctccccgattcagatccatcggcaaacagccttctcgttgttgaagtttacacggacagcggcaactggtcgagctacccgcctcataaacatgaccaagacaatctgccggctgaatcatttttagaagaaacctattaccatgaaacggacccgccgcagggatttgtcttccagcgtgtgtacacggacgaccgctcgattgacgagacgatgaccgcagaaaatgaaaacgttgtcatcgtgccggcgggctatcacccggttggtgttccggacgggtatacctcttactacatgaatgtaatggcgggaccgacacgaaaatggaagtttcataatgatccggcccatgaatggattctggaacgctgacaagtgaggagtggcagataacgatgaaatatacgtttaatgaagaaaaagagtttgatattgtcgcgatcggacgcgcgtgtattgatttgaacgcggcggaatacaaccggccgatggaagaaacgatgacgttttctaaatatgtcggcggctccccggcaaatattgcgatcggcagcgctaagctcggattaaaagccggttttatcggcaaaatcccggatgaccagcacggcagatttatcgtttcttatatgcaggaaaagggcgtcgatacgtcacaaatgaccgttgacagagaaggacgcaaagccgggctcgcttttacggaaattctcagtcctgaagagtgcagcattctgatgtaccgggatgacgtggcggatttgtatctagagccgtccgaagtcaatgaaggctacatcgcaaacgcgaaaatgctgctcgtatcaggtacggcgcttgcgaaaagcccgtcgcgcgaagccgtcttaaaagcggtgcaaatcgcaaaaaaacatgacgtaaaagtcgtgtttgagctcgactaccgtccgtatacatggcaatcggcagaagaaacagccgtgtactacacgctggcggcggaacaatccgatatcgtcatcggtacgcgtgacgaatttgacgtaatggaaaaccgcagcggcggaaataacgatgaaaccgtccgccatttgtttgcgcactccgccgaccttgtcgtcattaagcacggcgttgacggatcatacgcatacagcagatcgggagaagttttccgggcgcacgcctataaaacaaaggtgctgaagaccttcggagcgggtgattcctatgcgtcagctttcatctacggactggtcagcggccgggatattgaaacgtcgttaaaatacgggagcgcttccgcttccatcgtcgtcagcaaacacagctcctcagaagcaatgccggctgccggtgaaatcatcgaactgattgaagcgcagcacagtcttaacggtaaatagaacgtataaaaggtgggatcgtttgtgggtaagacaattcgcttaacgacagcacaagcgctgattcaattcttgaaccggcagtacattcatgttgacggaaaagaagagccgttcgttgagggcatcttcacgattttcggccatggaaatgtgttggggatcgggcaggcgctcgagcaggacgccgggcacctgaaagtctatcaaggcaaaaacgaacaaggcatggcgcatgccgcgatggcatacagcaagcagatgctgagaagaaaaatttacgcggtatcgacatcggtcggtccgggtgccgctaacttgacggctgccgcgggtacggcgctggccaatcatatcccggtgctgctgcttccggccgatacctttgcgacgaggcagcctgacccggtgcttcagcaggtggagcaggaatacagcgccgccgtcacgacaaacgatgcgttaaagcccgtgtcccgctattgggaccgcatcacccgccccgagcagctgatgagcagcttaatccgggcatttgaagtgatgacagatccggcaaaagcgggcccggcgaccatctgcatttctcaggatgtagagggagaagcatttgattttgatgaaagcttctttgaaaaacgtgttcattacattgatcggatgcagccgagcgagcgtgagctgaaaggcgccgcggagagaattaaggagagcagccgtcccgtcattttagtgggcggcggcgcgaagtactccggcgcgcgtgaggaattaatcgcgctttctgaaacatacggcattccgcttgtcgaaacgcaggccggcaagtcaacggttgaagccgattttgccaacaatctgggcggcatgggcatcacgggcacacttgccgcaaacaaagccgcccgccaggctgatctgatcatcggtgtcggcacacggtacacggactttgcgacatcctcgaaaacggcgtttgattttgacaaagcaaaatttttgaatatcaatgtcagccgcatgcaggcatacaaacttgacgcgtttcaggtcgtagccgatgcgaaagtgacgctcggcaggctgcacggcttattagacggatataaaagtgcattcggcacggcgattaaaggctggaaagatgaatggctggctgaacgggaccggctcggcaaggtcacttttacacgtgacgcgttcaagccggaaattaaaaaccatttctcacaggacgtgttaaacgagtatgccgacgcgctcgagactgagctgccgcaaacaacggcgctgttgaccatcaacgacacgattcctgaagacagcgtcgtcatcagttcggcgggatctcttccgggcgatctgcagcggctgtggcattccaacgtcccgaatacgtaccatctggagtacggctattcctgcatgggatatgaagtatcgggcacgctcggcctcaagctggctcatcccgacaaagaagtctattcactcgtcggcgacggaagctttctgatgctgcactcagagctgattaccgcgcttcaatataacaaaaaaatcaatgtcctgctctttgacaactccgggttcggctgtatcaacaacctgcagatggatcacgggagcggcagttatttctgcgagttccgcacagaggacaatcagattttaaacgttgattacgcgaaggtggcagagggctacggcgctaaaacatacagagccaatacggttgaagaactgaaagcggcgcttgaagatgcgaaaacgcaagaggtatccactttaattgaaatgaaggttctgccgaaaacgatgacggacggctatgacagctggtggcatgtcggcgtggcggaagtgtctgagcaggaaagcgttcagcgggcatacgaagcgaaagagatgaagctgaagtctgcgaagcagtactagaggggaggcatcacgatgggcaaacaaaatattttgtggggcatcgctcccattgggtggcgcaatgacgatatgccggagatcggagccgggaatacgctgcagcatttgttaagcgatattgttgtcgccggttttcaaggtacggaagtgggagggtttttccctgaaccctccgtcctcaataaggagctggctctccggaacttgcggattgcggggaaatggttcagcagctttatcattcaagacggtattgaaaaaacggctgaacaatttacagaacactgtgattatttgcagaaagtcggagcggatgccgccatcgtttctgaacagacgtacagtgtccagggcttggatattgatgtatttaagaaaaaaccgcacttctcaaatgaagaatgggatacactgtgccaaggcttgaaccgtctcgggaaaatcgctgacgaatacgggctggagctcacgtttcatcatcatctcggcacaggcgtccagacggcggaagaagttgaccggctgatggatggaacggacccgcggtatgtccatttactttatgataccggccatgcctatatctcagacggagactatatgacgattctcaacaagcatatggatcggatcagacacgttcatttcaaggacgcgcggtttgacattatggagcggtgcagacaggaaggcaagtcattcaggcagtcgtttttacagggcatttttacggtgcccggagacggatgcatcgattttaccgaagtgtaccaaacgctcgtccgtcatgattattcaggctggatcgtcattgaagccgaacaagacccggcagtcgccaatccgcttgagtacgcgctgattgcgagaaagtacatcgacagtgaactgcttgatcctgcaaattagagggggacttatatgaatagtgccaaggcggaatcagctttcagcaaacggaccatcgccgcagcattagcaaattacattgatgcaggttccatcgtggcaggatcagcgggtttatctatgtgggtcagctacttgaagctgtccgacagtcagatcggattgctcggcgccttcagcgcaaacgcgatatcagcggccatcggagcgctgctcggcgggtatttggctgataaggtcggccgaaaagctgtatacacaaacagtatgctcgtctacgctttaggaatttgtttggttttgtttggattcaactttcccatgctgttatgcggatacatgattatcgggatttctgtaggcgcggatattacggcttcatggaccattatcgcggaaaacgcccccgagaaaaaccgggcgaggcattgcggagtggcgcaggtggcgtgggccgccggagccgttgtggttctgctgttatccgttttggtcggtgacctcgggcttttaggaaataaaattgtctttgcgcatctattggtgatcgccctgatcacatatgtgataagaaagcgtttacctgagtcggatgcctggaaaaacagtgaagagcggcctgccgccgtgaaaaaaacatcttattttgacttgcttcagccgaaatttttcaagaacattttgtttttaatgggtgtgtttctcgtatggaatctcgccgcgggcgtcatgggattcttcatgccgtacatctaccagcaggtcggcggcgtatccgcaaatacggccaacattctgcagatggccctgtttatcttcaccgggctcggcgtcgcctgtatcttcatgccttttgcagatcaatatcggaaaacggtgttcggaatctgcgcctttatggctgttgtcggctggtcgctgtttttgctgccgtttcagggactcccgatgctgcttttgtttgttttagcgatcggcatcaataacggagccggccagcaggcgaactaccagctgtgggcaagcgagctgttcccgacagaacacagagcgtcagcacaagggctcatgttctttctcgtccgtatttcaatcggcatttggagtttatttgtgccggtcatcatgtcacaattcggcatcggttttatggccggtattctgctcatatgtgtgacggccagtatgatcatcgggcttgtcttcgcaccgaatacgtccggcaagtcgcttgaacagatacaggaggaactgtacggtgctcctcaggacggcagagagaaaagaaagacgagaaccattatttgattatcagaaggagtggcgatcaatgaatttacgtataggtgttatcggaaccggtgctatcggaaaagagcacatcaaccgcatcacaaataagctgtcgggcgcggaaattaccgctgtcacagatgtgaatcaggaggccgcgcagcagaccgttcagcatttcaatttgaacgcctcggtttatcctgatgacgacagccttctcgctgctgaaaatgtggatgccgtcttagtgacaagctggggcccggctcacgaatccagcgtgttgaaagcgattcagcacggcaagcacgtgttttgtgaaaagccgcttgcgacaacggcagaaggctgtatgcgcattgtcgaggaagaaatgaagacgggaaaacgattggtgcaggtaggtttcatgcgcagatatgacagcggttacgttcagctgaaagaagcgatcgacaaccgtgcggtcggcgagccgctgatgattcactgtgcgcaccgcaacccgacagtcgcatcgaattattcaacggacatggccgtcgtcgatacgctcgttcatgaaattgatgtcctccactggcttgtcaatgacgactatgaatccgtacaagtcatctatccgaagaaatcaaaaaatgcgctgccgcatctgaaagatccgcagatggtcatcatcgaaacaaaaggcggcatcgtcatcaatgcagaaatctatgtgaactgtaaatacggctatgacattcaatgtgaaatcgtcggggaagacggcgtcattaagcttccggaaccgtcaagcatcagcttgagaaaagaaggaaaattcagcaccgatattctgatggactggcagcgccgatttgcggctgcgtatgatgtggaaattcaggacttcattgattcgatccggaagaaaggcgaagtcagcggtccgacggcatgggacggttatattgccgcggtgacaacagacgcgtgcgtaaaagctcaggaatccggacagaaagagccagtggcgcttcaagagaaaccggcattctatcaatcatttacgactgtgaacaaataatagatcgggagtgaaaaaatgaaactggccttagatccatccatgtaccgcgatgatttaacattagaggaaatggtctataaaacggcggaactcggatacgaatatatcgaactgtccccgcgcgaggatttttgtcctttctataaatatccgaaagtcgattcagcaaaaatcaaacaattgaagcgccttttaaaggatacaggtgtgaagctgtcctcccttcttccgctttaccactgggcgggtcctgatgaagaccgccgccaggccgccgtgcgcaactggaaacgggcgatcgaaattgcggttgaacttgaagtggatttgatgaacagtgaattcagcggttcaaagtatgatccgttgacaagtgaagaaaaattcatcaaatccatggatgagctgctgcccgtctttgaaaaagaaggcgttaaactcaatcttcaagcccatccatacgattttatcgaaacgcacaaaggtgcgatggatatgatccgcgcgctcgataaggattggatcaatcttgtctactcgactgcgcatacgttcttctatgatgacggcaaaggcgatatcgaaaccatgtttgatgaagccggcgaccgcctcacacatgttttatttgcagatacttttaatcataaagcggcgcacggcctgcgttacatcgtcaatccgcctgatgcgaaagtaacggttcaccagcatctggacatcgggcaaggcgaggtcgattttgagacgattttcagaaagatgagagagatgaaattcgacggaattgcgacgaacgccgtgtttgcttgggtcggcgaaagagcggatgaatcaagccggaccacgcttaagaaattaaaggaagaactgggtatggcataagctgagtatggagttcggcggagcggggcaaaaaagcccttcagccggactcccttcatatcgaaaacgcggatgggagaggctgacatgaaactttgctttaatgaagcgactacgctggagaattcaaacctgaaacaggatttagaactgtgcgaaaagcacggctatgattatattgaaatccgcacaatggataagctgccggaatacttaaaagaccattcactggccgatctggcggaatattttcatacccatcatattaaaccgcttgccctgaacgccctggttttcttcaacaatcgtgatgagaagggttatagggagatcatttcggaattcaaaaaaatgatggaaacctgcaggacgctcggcgtgaaatatgtggtggccgtgccgcttgtgacagagcggaaaatcttgaaagaagaaatcaaaaagagcagcatagaggtgctgactgagctttcggacatcgcggagccgtacggcgtaaacattgcccttgaatttgtcggccacccgcaatgcacggtcaatacatttgaacaggcgtatgacatcgtgaacgctgtcggccgcgataatgtcggactggtgtttgacagcttccatttccacgcgatgggctccaatattgagagcttgaagcaggcggacggaaagaaaattttcatctatcatatcgacgatacagaagactttccgatcggctttttaacggatgaagaccgcgtctggcctgggcagggtgcgattgacttagacgcccatctgtcagcgttaaaagaaatcggattcaatgatgttgtctccgtagagctgttcagacctgaatattataagctgactgcggaggaaacgatcaaaacggcaaaggaaacaacggaagccgtcgtatcaaaatacttcatgaaggaggcgtgaacatggcttttgtcaccatgaaacatcttcttgcagaagcgaaacgggagcattatgcagtcggccaatttaatatcaacggcctccaatggacgaaggcgattctgcaagcggcgcaaaaggagcaatcgccggtcatcgccgcggcttccgatcgtctggtcggctatttaggcggatttaaaacgatttccgccatggtcggcgcgttaatggaagaaatggcgattaccgttcccgtcgtgctccatcttgatcacggaagcagtgcggaacgctgcagacaggccattgacgccggattcagctcagtgatgattgacggctcccatcagccgattgacgagaatatcgcgatgacaaaagaagtcaccgattatgccgcaaagcacggcgtctcagtagaagccgaagtcggcacggtcggcggcatggaagacggacttgtcggcggggtctgttatgccgatatcatggaatgtgaacggatcgtgaaagaaaccaatatcgacgcgctggcggccgccctcggctccgtccacggcaaatatcagggcgagccgaatctcggatttaaagaaatggcggctatctcccgcatgactgatattcccctcgttctccacggagcatccgggattcctcaggatcagatcaaaaaagccatcacgctcggccacgcgaaaatcaatatcaacacggaatgtatggtagcctggacagacgaaacacgccgcatgtttcaggaaaacggcgatctgtacgaaccgcgcggctacatgacacccggccttgaagccgtggaagagacggtgcgaagcaaaatgagagagttcggatcagccggtaaagccgtaaaacagcagatcggctgatgaaaacggaaaccgccaagatggcggtttttttgtgcggtgttgcgtccgtacgcccgaaacgattatgatgatggcagcagtgtaagaaacgggagtggttcagtttgaataaaatcatgattgtggaagatagtgaagacattcgcggactattgcagaattaccttgaaaaatacggatatcaaaccgtggccgccgcggatttcacggctgttcttgatgtctttttgcgggaaaagcctgatgtggtgctgcttgatatcaacctgccgtcttatgacggctattattggtgccgccagatccgccagcattctacaagcccgatcattttcatctcagccagaagcggggaaatggatcaggtgatggcgattgaaaacggcggagatgattatatcgaaaaaccgttttcttatgatattgtgctggcgaaaatcaaaagccagatccgcagggcatacggagagtacgccgccaagcagggagagaaagtggttgaatatgccggtgtgcagctctttgtggaacggtttgaactgcgctttcaggacgaaaaaagcgagctttctaaaaaagaaagcaagcttttggaagtgctgctggagcggggagaaaaggtgacgggaagagaccggctcatggaaaaaacgtgggacaccgacattttcgtcgatgataatacgcttaacgtgtatatcacgcggctcagaaaaaaactgcgggagctgaacgcgcctgtttccattgaatcggtgcggggcgaaggctaccagctgagggcgctgtcatgaagctgtttctccggtctcatgccgtgctgattctgctttttctccttcaagggctgtttgtcttcttttattactggtttgcgggtcttcattctttttcccacctgttttacatattgggcgtgcagcttcttattttggcggggtatcttgcctatcgctggtacaaagaccgcggtgtgtatcattggctcagctcggagcaggaagggacggacatcccgtatctcggttcttcagtgttctgttcagagctgtatgaaaagcagatggagctgacccggctgcagcaccagaagctctacgagaccgaagccaagctcgacgcgcgggtgacgtatatgaatcaatgggtgcaccaagtaaaaacgccgctgtcggtcattaatttaatcattcaggaagaggatgagcccgtctttgaacaaatcaaaaaagaggtccggcagattgaattcgggctggagacgctcctttattcatcaaggcttgacctgtttgagcgggattttaaagtcgaagcggtttccttatcagagcttctccaatcggtcattcaaagctataaacgattttttattcaataccgcgtctatccgaaaatggatattcgcgatgatcatcagatttacaccgatgccaaatggctcaaatttgcgatcggccaagtcgtcacaaatgcggtcaaatattcggcaggcaagagtgacagactggagctgaatgtcttccgcgatgaagacaggacgatgcttgaagtcaaagattacggtgtcggcattccctcgcaagatatcaagcgggtgtttgacccttattacaccggcgaaaacgggcggcgtttccaagaatctacgggaatcggcctccatctcgtcaaagaaattacgggcaagctcaatcatacggtggacatcagctcgtcccccggtgaagggacatcggtccgattttcatttcttacaaaaatgtaagactgcgttaagaaaacaacatagctcattctgtttccccttgataacatggatttacgtcaaggggattttttatgctgaatgccccggcactacatgaaagcagcccagatcaacaagaataaaaccataaggaggattctcatggcgaatatgcttgaagtcaaacatataaataaaacctataaaggacaagtatcctatcaagctttaaaacaaatttcattttcaatagaagaaggcgggttcacggcggtgatgggaccgtccggctccggaaaaacaacacttttgaatatcatttcaacgatcgaccggccggattcaggcgatatcctgattcacggagaaaacccgcaccggctgaagcggacaaagctcgctcatttccgccgcaagcagctcggatttgtgtttcaggatttcaatcttctggacacgctgacaatcggtgaaaatatcatgctgccgttaacgcttgaaaaagaagcgccgtctgtcatggaagaaaaactgcacggcatcgcgaaaaagctcggaatcgaggacctgctcaataaacggacgtttgaagtatccggcggacagcgccagcgggccgccatcgcaagagcggtcattcataagccgtcacttattctggccgatgaaccgacgggaaaccttgattccaaagcgtcaaaagatgtcatggaaacgatgcagagcctgaatcaggatgatcatgtcacggctttgatggtgacccacgatccggttgcggcaagctactgccgccgcgtcatctttataaaagacggcgaactgtttaatgagatttaccgcggggaaaaccgccaagtcttttatgagcagattcttgatgtgctgtctatgctggggggaaacgcaaatgacctttcttcagttcgcttataaaaacgtcacgagaaacaaaagggcctatcttgcattcttcttgagcagcgccttttccgttttgattttctttacctttgcgatgttcctgtttcatccggcactaaaggaaggctacctgaataacatcgccaaaaaaggcttaaccgccgcggaatggatgatctttgttttttctttcttatttgttctgtattcggttaacgcatttttgaaatcgagaaataaagaattcggtattctgctgatgcagggtattacgccggtgcagctgagaaagctcattacggcggaaaacatgatcatcggcgtcatgtcgatcgcagcggggattatcggaggcttcattttttcgaaaacgttctttacggtcggcgcttatattttagaaatggacgcgctgcctctgtacatgccttggaaagcgctcggcattacggccggcggatttctgctcttatttttccttttatcgcagttcacgatcctttttgtcagatcaaatacggtgatcaaattaataaagggcactgacaagatcaagccggagccgaagccgtccgtgcttctgtccttattcggcatcgcctgcctgtgcggcgggtacggcatggttctgaaaggcaatgtccacgggaccgagccgttcatcattttactgcttaccgtcatcggcacgtatttctttttcagccaaagcagcatctggattctgcgcgcgctgaagaagtggaaaaccttttatctgcgcgggaaaaatgttatttgggtttctgaccttgtctatcgtttaaaagacaacgcccgcctgttctttatcgtcagtattatttccgcggttgcctttacggcgacgggcgtgctcgcgatgtacaaatcgaccgtcggggcggaagagtccgcctatgagatggagtatttatctttcagcaataacccgaaagaacagactcatttgaaagatattgaccatgaactgaaaacacacggctttacgtataagaaagacaaaatagatgtttcctatgttcgctatcaggaaggagaaactgttccccctgtttatatgatcagcgaatcggatgtatcaacatacttccatgttaagctgaacggcctgaaacataatgaggctgtctatttcccgggcacgtatgaccgcaatttcaaaaacgacgcgccggatcagctgaagctgctgaaccaaaaaggcaagccgtctgaccaaaaactgacggtaaaagaagtcaaaaaaccgctgatttcattgaatgccatcatcgcggtgaacgatcaaacctttgatcagctgaaatcactcggtgagaaagcgtcattatacggctacagctatgatcattggaaagacagtcttgggatcagccaatccttgaaaaatgagatttacggcaactatatcgacgtgcattctgattttatggcaaaagccgggacgtactatgatacggtgcagctgccgagcctgagtttattcatcggcctgtttatcgcgatcgttttctttgtcgcggcagcgagtttcttatatttcaggctgttcaccgatttagatgaggaccgggagcgctaccgctcattggccaaaatcggtctgagtgagcgtgaaatggcacaaagcgtgacgatacaattggcgattctctttttctttcctttcgtcattgccgtcatgcatacgctgtttgctttgagaacattagcggtggaaggctattccgatgtagcggggccgctcagtctgaccatcggagggtttttcatctttcagcttctgttcttcctagcggtgcggacaagctatttgaaaaaaatgaacaagtaaggggagtgcacagatgaaaaaagcattggcaatcctggccgtcttagcagccgctgccgtcatatacggacttctcttttttcataatgatgttacagacagatttaatccgtttattcaccagcaagatgtttatgtacagattgatcgagatggcaaacatcttagcccgggcggtactgagtatacattagacggatataacgcatccgggaaaaaagaagaagtgacctttttcgccgggaaagaccttcggaagaacgcgtatttgaaggtgaaggcgaaaggaaagtatgtcgagacctgggaagaagtcagatttgaagatatgccgggctccgtacagtcaaaattaaagtgaacatgaaaaacggcacagtgtcatgactgtgccgctttttttattttttattttttattttcttcagcccgtttgatcagcatgtcggtgatgatatccatctgtttgctgacggcaatcgggtcatacggatagaaggtgttgaaatcgttgataaagacacggttgttctttacggcatcgagatttttccaaacggatgactctttcagacgctcaaatgttttgctttctccattcggattgtaatcggtaatgaacatataatcagccgcatattgagggatgacctcttgggaaacctgtttcatggcgcccgttttcatgatgtctttttcgattttggccggcgctttcaatccgagtgcgttataaacggcttggccgccgcggccggaattgtcattaaaaatccagatttcgcctttatccgtcgtttcataaaggccgactgtctcgtctttgccgatcacgtttttgaggcgcttttgatcggcttcagcctttttgttgaagtctgccataaagcttttggctttatccttcgccccggcaatgtcgccgaataggctgaccgtatctttcgtattctttgcggtgttaaaaggaatgacaatcgtcggtgcgattttcgatagtttctcgtattggtcatccttcatcagcacgattaaatcaggcttcagctgcatcactttctccacattgacgggattgccgatgtccgtggtgtttttcagctgttttttgataaacggatttttgaaagcccatgagcccgccccgacgacatttgcgtcaacggacagcagctcacccgcataaaagtcagtgacgatccgttttggatgtgcgggtatgtcaatatttccttttgttgattcatatgtacgcatgtctgtctttcctttgcctgatgccgatccgttgttttccttcgcgccgctgcaagcgcttaatgcgaaaacaagcagaagtgccaggccgatcagccatgattgtttcttcataatgatccccctatttcggtgataatgattatcattattaatatagcaggaagacgtcattccgtctatgttttttatagaaaaccttccttgattatccatgttatagtagtaaaggaggaggaatgaatgttgattacgaaaagagggacttggtgggaagtgctgcacagctggtggctgctgctgactttcgcgccgtttgggctgaccgctttcttggcctttttctatatcggctaccgggccaagaacaaaaaatggctgaaatacggacttatctattttattattttagcaattgcttttgtgctgccgagcacgccgggcgtgtatatcgtgctgcctttatgggtcatctccatcatccacgggctgaaagtgcgggcggcttatttaatacagcttgatgtgtttaaacaaaacgtcgaagcaagagcgtttgaagcggtaaggcatgaggcggaggaaaaattcggcggaaaacccgctcaacgcattgatctgacaaaacagagataaaaacaaatgacaaagccggtatctcgcgctttgtcatttgcatgaccggcctattgctggtatgaatgctgctgaaacggtgtgtgtgatgctgtgtttgcgggaatgaagaaacattagcgtttgccatcggtgcaggcatgtgtccgcttacttcctgctgaagctgattgcacacattcacgatttgctggcatttctgaatggccagttcatgcccctgcagcgcttgctgaatggtatgaacggcatgctgttcatggttaagcatctgctgaagcatttgaatgttttgctgttcctgctggagcatttgcttgtactgctgactgctttgctgtgtctgctgaataagctgctgtgctgtttgacggcattgctgcagctgatttccgctgtattggttttgatacatcatgaagacctcctgaagtgattgattttacacatttatcatgtgaaagaataggagaggcattcatgcaagaaaaggattcaaatatttacctgttatgtacagagcggaatacaaggctcgggatggcctgtcgagctttgtattccggccctttttctcagaagccgccttctgtagcgtgaaaaggaatattgagtctgttttcgactgcgcgcaggcgctgattcaaacggtttaagcggcgggtatggatttcaatggactggctcagccgtctgatctgctcattcatacgcgtgatttcccggttttggcgctggtcttcttgtgagaggcgggtgagctctctcgtttgctgggcgttttgtctttcaagctgggcgactctccgttctaaagccgtcggctgccgctcttcagactgagggggcgcataataatagctttcctgctgctgatacggctcatactcaacggggctcacttcgtattcctgctgctgagggaaataggcagatggggtgtagtactgatatgggttcattcatcattctccttatctagtgaagtctttatacactatgtagtcaattgcacagtgccacggcatccgcctaacttacaggcgtaaaaagagcttcaaaggaaggtgatcatgttgcggaacatacggattttcatcatgacggttcttgttatcggatgcgtcatgataacaggctgctcgcaaaagaaagcagacgaaccccctttttattacgggacatgggatgcggggctgaaaccgggcccgatggacggggtcagatctgaaaccgttacgtttacgaaagacagcgtgctgacaaagcaggtcattaaaggccgcggcgaggttcccatgccctcagatgcttacaaggtggtctcacaaaacacggacgggacgatcgagattgaatacctcggacatccgcaccccgtcaaaagcacgttgaaaagaggaaaaaacgatacgctcatttggaagatatacggagaaacaaaaacaatgacaagaataaaaaccggcggggaggatgcacatgagaaataaggctgccgacagactcgttttgacgggtgtcatcgtacatatcattcaatggttttcactgttatggttattttttatgctttttgatcagttcgggcgttttaccatttataatcccaatgtcgtcaacggcagcatgcagtctttttcattctttgatatgatgcgcgctcttctgttttccggcacgctgcggaatacgctcctgctgtttctgtttgcggcgatgctcatttacttgtgggtgaacgctctgtttatcctgctggaaatcgtttcttatatcatgatcaggcggaacagccgttcattatgggcatactttcccgcagcgatgggaataaagcttgcccttctggacatagcggccgtccctttctttgcggcggggctgatgctcttgaagcagaaaacagatgacagcggcgaacaagctgacaaggggaaaagacggccccgcatccggaggcaggcccggtataggaagagaaggcggagaaacttgtccgtttgatttttcattgaaacgaaaaaacgatatgatgaaagcataagcagaaaaggatacaaaggagatgcaggatgtacaagttaatcgcaatagatatggacggaacactattaaacgatcatcatgaagtgacggctgaagtccgcggggcgcttgatgccgccaaagcggaaggggtcaatatcgtcctgtgcacgggccggccgatcggcggcgtgcgtcggtatttggaagagctgaacttacaggaagaaggagactttgtgattgcctataacggcgcactcgtccaaaatacgtatacaaacggtgtcgtggccgagcagtcattaggctttgaagatttggagtcgctttacgagctgagcttacagttggatactccgatgcattactttgacacagccaatctgtacacgccgaaccgggatatcagtgaatacacggtatacgaatcatacattacgaaagtgccgcttcatttccgcacgatcgatgaagtgccgaaggatattctgattccgaaagtcatgttcattgacgatccggacaagctggagaaagcgatcgcttctattccggaatcattcagggaaacatacacaatggtcaaaagcgcgccattcttccatgagattcttcacccgaaagtcagtaaaggaaacgcggtcaagctgctggccgaaaaactcggcattgaacagaaagacgtcatggcaatcggcgataacggcaacgacatgtccatgattcagtgggccggctgcggtgtggcaatggccaatgccatcccggaagtaagggagattgctgattatgaaacgaaatcaaataacgaacacggcgtggcgcacgcgattcaggagcttgtgctgaaaaaataggcaccccatcagagggtgcttttttaccgcgtgttttggtgatatgataagcggagaggggaggcgcgacatggatcgtgaaaaacagcagctcagcatagaagcggcaaaactatattatcaatcagattacagccagcagcagatcgccgaacggcttaatctgtcacgccccaccgtttcaaggctgcttcagtacgcaaaggaaaaagggtatgtgcaaattcgcgtcatggacccgtttgaggatctggatgaactcggcgcgaagctggaagaaaaatacgggctgcttgaggcgcacgtcgtcttttctccaagcgacgattaccaggccattacacattacttaagccgctatggcgcagactatatgcataaaaccgtaaaggacggcgatatactcggcgtaagctgggggacgacgatgtaccagatcgcaagccgcatggagccgaagcaggtaaagagcgttgaagtcgtgcagctgaaaggcggcatcagtcattccaatgtcaatacgtattcgtcagaaacgattcagctgttcgccgaagcatttcagaccatgccgaggtatttgccgctgccggttatatttgacagcgccgatgtgaaacagatggtcgagcgggacagacatattaagcggatcattgaaatgggcagacaagccaatatcgccctgtttacggtcggaaccgtccgggatgaggcgctgcttttcagactcggctatttccgggaagaagagaaacaattgctgaaagcacgcggagtcggcgatatttgttcgcgcttttttgacgaggaaggcaggatttgcagcagcagcattaacggcaggacgatcggagttgagctcagcgacctgaaattgaaagagcgttcgattctggtggcgggcggcagcagaaaatgcaaggccattcacggtgccctgaaaggaaagtacgccaacgttttgattactgatcagcatacggccaaaaaactcattcaagaattgtgacaattcatgaacataatttcaattaccaatttacatatgttcaaaattcggttattctaaacgtatcctaggaaaaaggaagtgcatacaatgtcaattgcaagtcaaatagaccatactgctttgaaaccgcatacacaaaaagcggatattttacaactgataaaagaagcaaaagaatataaattcgcttccgtttgtgtgaacccgacttgggtcaaactcgcagcggaggaactgaaaggcacgggagttgacgtttgcaccgttatcggatttcctctcggcgcaacgacatcggaaacaaaagcatttgaaacgaaggatgccatctcaaaaggagccactgaggttgacatggtcatcaatatcggcgcattaaaagacggcgatgatggagcggttgaagctgatatccgcgcggtagttgaagcagctgataaaaaagcgctcgtcaaagtgatcatcgaaacatgccttttgacagatgaagaaaaagagcgtgcgtgccgcttggcggtatccgcaggcgctgatttcgtcaaaacgtctaccggtttttctacaggcggggcaacggctgaagatatcgctctcatgagaaaaacagtcggaccggacatcggggtcaaagcatcaggcggcatcagaacaaaagctgatgttgacagcatgatcgctgcgggcgcgagccggatcggcgcaagtgcgggcgtctctatcgtgagcggcggagacagcggcagcagcgactattaatcagcattgcggaagccgaaagcttccgccatcctctttctttgttgatgcataaaaaattgtaagcgaatacaaataaaaggagaacacatatgaagtatctcatcggaattatcggaatcattgtgtttttaggtcttgcctggcttgccagcaacggcaaaaaaagaatcagaatccggccgatcgccgtcatgctcgtgctgcagctgattctcggttatattctcctcaacaccggtatcgggaattttcttgtcggcggttttgcaaaaggatttaactacttgctggaatatgcatcagaagggattaactttgtattcggcgggcttgtgaatgcgaaacagacgacgttcttcatgagcgtgcttctgccgatcgtctttatatccgctttaatcggaattctgcagcattggaaggtccttcccttcatcacgaagtatatcggtcttgcgttaagcaaggtgaacggaatggggaaaatcgaatcttacaacgctgtcgcatccgcgattttagggcaatcagaagtctttatcagtttgaaaaaacagctcggctatcttactgaacagcgcttatacacgctttgcgcgtccgcaatgtcgacggtctcaatgtcgatcgtcggttcttacatgatgatgctgaagcctgaatacgtcgtgacggcgcttgtgctgaacttattcggcggatttatcatcgcttctatcatcaacccgtacaccgtcagcaaagaagaggatttgatcttcgttcctgaagaagaaaagcaatccttttttgaagtgctcggtgagtatataatggatggattcagagtcgccgtcgtcgtagcggcaatgctgatcggatttgtcgcactcattgccctggtcaacggcgtttttaacgcggtcttcggcattacattccaggcgctgctcggatatgtattcgcgccgtttgcgtttttaaccggtattccgtggaatgaagcggtgagcgccggaagcattatggcgacgaaaatggtatcgaatgaatttgtggcgatgcagacgctctcatccggcgatttccatttcagcgcgcatacacaggcagtggtatctgtattccttgtctcattcgcgaatttctcctctatcggaatcattaccggtgcggtgaaagggctgcatgaaaaacaaggaaacgtcgtcgcgcggttcgggctgaagctgctgtacggcgcaacgctcgtcagtttcctgacagcggcgatcgtcggattgattcactgaacataaatgaaggacaggtgatagatcatgagaatggtagatcttattgtaaaaaaacaaaatggaaaagaactgacaacagaagaaattcaatttttcgtaaaaggatacacggacggaagcatccctgattaccaggcaagcgcgctggctatggcgatttactttcaggatatgacggatcaggagcgcgccgatctgacaatggcgatggtcaattcaggggaaacgattgacctctccgccattgaaggcattaaggtcgacaagcactctacgggcggggttggcgacacgacaactctcgtactcgctccgctcgtcgcggcgctcggcgttcccgtcgctaaaatgtccggccgcggccttgggcatacggggggaaccattgataagctggaagcgatcgaaggcttccacgtggaattgtcaaaagatgaattcatcaagcttgtgaaccgcgacaaggtagccgtcatcggacaaagcggcaatttgacccctgccgataaaaagctgtatgcgctgcgtgatgtaacgggtacggtgaattccatcccgctgatcgcaagctcaattatgagtaaaaaaatcgccgccggagcagatgccatcgtgcttgacgtcaaaacgggagccggcgcgtttatgaaaacggatgaagacgccgtgaacctcgccaaagcaatggttcgcatcggaaacaacgtcggccgccagacgatggccgtgatttctgacatgtcgcagccgctcggttttgcgatcgggaatgctctggaagtgcaagaagccattgatacgttaagaggggaagggcctgaagacttaaacgaactcgtcctcacgctcggcagccaaatggtcgtattggcgaaaaaagctgagacattggaagaagcgagaacgaagcttcaggaagtcatgaaaaacggcaaagcgcttgaaaagttcaaagagttcctgagcaatcagggaggagacgcttctgtcgttgacgatccgtccaaacttccgcaggcggcgtacaaaattgacgttccggcaaaagaagcgggtgtcgtttcagaaatcgtcgctgacgaaatcggcgtcgcagcgatgctgttaggcgcgggacgtgcgacaaaagaggacgaaatcgaccttgccgtcggtattatgctccgcaaaaaagtcggtgacaacgtcgaaaaaggtgagccgctcgtcaccctttacgccaaccgcgaaaacgttgacgacgtgaccgccaaagtctatgacaacatccgcatctcagaaaaagcggaagcgccgaaactgattcatacgctgattacggaataagacaaaaaaggcacatacctcatcagtatgtgcctttttttttatggcatggttttatccaaatgaatgtcacggacggattgtttcggctgtttctttctcaaaaaacgaatgagatagcacaggatcatacaaggaattccgcagaagagggcgattctttgattgggatcaaatgcaaggcctacgcatgaagcgaaacataagatcacagcggcgatcggaacgagagggtataacggcgtgcggaaggtcagatccgcgacgcgtccgccgtttttcacataatgttttcgaaataacagctgagacagggcgatgctcatccacaccacgacgccggcaaatccggctattgccacgagcaccacgtagaccgtgcccggggcggcgatgcttgagatcaaggatatgcaggaaacggccatgctggcgagcagagcattcagcggaatgcctttcggcgtgacttttttgaaccgggcgctgatcatgttttcattcgcaagagaccacagcatccgggtggaagcatacagtccggagttggcgaccgaaagcaaagccgttaaaatcacgaagttcatgatatctgcggcgtatgggataccgatctgggaaaagaccgcgacaaacggactttcaatcacaccggcttccttccaggagatcagtccggacagcacaaaaatggcgccgataaaaaagatgaccgttctccaggcgacatttcggatcgaacgcggaatatcttttgccggattggcggtttcacccgctgtaattccgatcagctccgtccctgaaaaggcgaagcttacggaaatcattgcgatgaaaaccgcaagaaagccgttcggaaacagtccgccgtgtgaggtgaaattcgacagcatcggagcttcacccgaaccgtgcaatgaaatcaaaccgaacatcgcggcgccgcctaagatgataaataaaaggatggtgacgattttgacgctggaaaaccaaaactctgtttctgcaaacaatttaacggagaatgcattggcggcaaaaaggagagccgcgaaaatcgcgctccacatccagacgctgctgtggggaaaccagcgctgcatgaggataccggaagctgtaaactccgatcctaccgtcaccacccaattcacccaatacatgataccgaccataaaacccgtggacggcccgataaacgttgtcgcatacgtttgaaatgaaccggtcacaggcatggctactgacaattctccgagacactgcatgacaagatacatcatcaagccgccgatcaggtaagcggcgatcgtcccgcccggcccggcctggctcaatgtataccctgtgctcaaaaacagccccgtgccgatgacccctcccaatgaaatcataaataagtgcctgcttttcatcgtgcgctttagttgattgccgccttgatcaacatccatcgtgatctccccctttttgcgtggcatgagaatcttccggcagccgagatcacgcgtgccggatttgactttaacgtgacaatttaaatcccttcaatgcatgtaaaatgacgtgtgcggctgcccggcttgtcatatcgcgaaaatcaagtgtcggatcaacctcaacgatctcaatacccgagatgtcagcctcctgggctaaaaaccggaccgcctgaagcagttcctcggtatacaggcctccggggccgatcgcaggacagccgggcgcatgagcttgatccagcacatccatatcaaccgaaataaaaatggcgtcggctcttttttgaacggccggcaaagtgtcttgtatcgttcggagaagccctttctcccggatcatctccattgtatgcacgtctgcctgacgctcttttacatatttttcatatgccaggctgttgctgaactccctgattccaagctgaatcaggttttgtccgcttatgatattttcatctaacagacggcggaatggcgtgccgtttgtcggccctccgtcttctgtgttgcggacgtcgtggtgggcgtcgaattgaaagacggccgttgttcctttcgtttccgcaatggctttaatggtggaataactgatggagttgtcgccgccgagaatgacgggcacccagtcaggctggtccgtcagaatatcataaatggtccgataaatgtgttcgtgagatttgacgacatccgtgacgtgaatctgaatatcgccgatatcgtacagatggtcaatgacatgctcccgcagctccgcggaatatgcggaaatgccgccgagcgcccggcggatcgcaccgggggcaaagcaggcgccggaatggctgattgacgacttagaaagcggaacgccgatcaaagccggccctttgatcgtttgtcccgcccacgcttccgtcacatcgccgatccttgtcacatggcggtcgttgaagagggagccggctttttgcagaaacggatacttatccaagagcggctccctcccttgaaacgaccgtcttcccgttcttgatgacacggcggacatgattgacgccgtaatgatacgggatatacatgtaattcggcgcttcccaaatgacaatgtcagccgcccgtccggctttgatttgtccggcctcttcgccttttccgatcgcatacgcagcgttaacggtgacagcgtgccagatttcttctgcggtcatttttaaatgaagcgcggcaattgacataatgagctggagattttccgtcggtgagctgcccgggttgaagtcagtcgccaaactgacccgtacgcccgcatcaatcatctcccgggctctcgcataagtgtgttttccgagatagaaagtcgtgcccggcagcaggacggcgatcgttccggactccgcaagcttttcgatgccttcgtcagatgcccccaccaaatgatcggcagaaacagcatgcagctctgccgccaattccgcgccgccgagcgggtcaatctcatcagcatggattttcaggccgaaaccagcttcagccgcctttttcaggtagtcccgtgactggctgacggtaaagacgcctgtttctgtgaaaatatcggcaaattgcgcaaggcctttttcttttatgtcaggcaaaagctgcagcatgcgattcagaaattcgtcagggctgttccggtactcaggcggaatggcgtgtgctcccataaaggtcgtgacaaggtcgaccggctggcgctcacccagttttttcgccgcggtcagctgtttcagctccgtgtctttgtcgagtccgtacccgctttttacttccgcggtcgtgatgccgtatgacagcatgcgtccgaggtgaaaaagccctttttcaatcagttcttcttcggaggcggctttcgtgtctttgaccgttgacaaaataccgccgccttgcgccagaatatccaaataagacatgccctgaatttttaaattcagttctttttcgcgggaccctccgaatacaagatgggtgtggggatcgacgaggccgggggtgacgagccgtcccccgcagtcgataatgtctcctgcctcgtatcctttctccgctccttgatgtccggcaaaaacaatgcgcccgtcgtgaacgccgatgacggcattttccgtgacatgaagatcctgcatgctcccgccggatcgggggccgccggattccatcgtcagcagctggccgatgttggtgagtatggtatctatttgtttcggcatgttaccgctcctttttcatcggtatcataatgtcttgttcctcggcgacttgaaccgctttttcataacctgcgtccgcatggcggatgatgcccatacccggatcgcttgtcagaacgcgggaaagccgttgttccgcaaggatgctgccgtcagcgaccgcgaccattcccgcgtgaagggaataccccatgccgacgcccccgccgtggtgaaaagaaacccagcttgcgcctgaggccgtgttgatcagcgcgttcagcaccgcccaatcgccgaccgcgtcgcttccgtctttcatcgcttctgtttcccgattcggagaggcgacagatccgcagtctaaatggtctcttccgatgacgatcggggctttcagctcgccgtttctgaccaattcattgatggcgagccccatcttttcccgttcaccgtagccgagccagcaaatacgggacggcaggccttggaacgtgacttttttctgcgccatgtcaatccagcggtggagggcttgattttctggaaacagctcttttaataaagcgtccgtgcggtatatatcttcagggtcaccggacagcgcagcccagcggaacggcccttttccttcacaaaataaaggccggatgtaggccggaacgaatcccggaaaatcaaaagcatcggcgagaccctcatctttggcagcctggcggatgttgttgccgtaatcaaagacgatagccccttttttcttgaaggcgagcatggcttccacatgctttttcatactctgcttggaaagccttacgtataaatcaggctgatcccggcgcaggcggtcggcctcctcaagtgagtatcctgccggaatatagccgatcagcgggtcgtgagcggaagtctgatcggtcacgatgtcaatatggacgccgcggttcaaaagctcatgatgcacctctgccgcattgccgagaaggccgatcgataaaggttctccggcttgtctggctgtttcggcccagcgcagcgcttcgtcaattgatgcggttttccggtcgcaatagtttgtttctatccgtttatcaatccgtgtttcatccgcttcaacggcgatgacgacgccatcattcatcgtgacggacagcggctgggcgcctcccattccgccaagtccggccgtcagcgtaagggttcctttcagactgccgccgaaatgctgtctcgcaagctccgcaaaggtttcataggtgccttgcaaaataccttgtgaaccgatataaatccagctgccggcggtcatttgcccgtacatcatcagtccttttttctcaaggtcatggaaatgctcccaatccgcccatttcggcacgaggaccgaattagccagcaggacgcggggcgcgcggctgtgcgtgcggaacagtccgaccggttttccggattggatcagcagtgtttcatcatcttttaacgttttgagggagcgctcaatcgcgtgaaaagcatcccagtttcgcgcggccttgcctatgccgccgtatacgatcagatcctccggcttttcggcaacctccgggtcaaggttgtttcggagcatgcggagcacggcttcctgctcccatcctaagcattcaagttcggtgccgcggccggcgcggattgatttctttacatcagtcatcttgtaagtcctccttcattggtcatcagtttttggtgatgctcattcggcagaaaagactccttcttcagccagtcactcagatgttcgatgtcataagaaaacacgcggtcttcttgtatggacggcacgatgtttctcatttcgagatagagctgttttgtgtacgaggcgcaatgttccgcaccccggtattccacggcctgcagcgcgcaaatggcttcaacggcaagcacccgtctcgtattcgcgatgatctggtaggcgtgccttgaggcgatggttcccatgctgacgtgatcctcctggtttgccgatgaaggaatggaatcgacactggcgggatgggccagggttttattttctgacacgagggaggccgccgcatattgcatgatcatcgctccggattgtaagccgggctgagggctcagaaagggcggcaggtcattcagctgcggattcacaagccgttcgatacggcgttcagaaatattcgcaagctcggccgccgccactttgagaaaatccatggcaaaggcgatcggctgtccgtgaaagtttccgcctgagatgattttggcgccgtcttcgaaaatgagcgggttatctgtcgcggcattcatctcaatttctaatttttcttttacatacgctaatgtctgccatgatgcgccgtggacttgaggaatacagcggatcgaataggcgtcctggacacgcagctccccttggacggtcgtcagcttgctgtctgacaagtaatagcggattcgctctgcgacatccatctgttcctgatatccgcgggcggcatgaatgtcctcgtcgaacgcatcgataatgccctgaaggccttcgatcgttaagctcgcgatccgttccgactgataggccagcttttcggcctcgaggtaagcgatcagtcccatcgcggtcatggcctgcgttccgttgatcagcgcgagcccttccttagaggtcaggacggccggctgaaggtttgtcttttccaaagcatgagctgccggcatccgggccccttcgtaaaagacttcgccttgcccgataagcgccagtgcgagatgagaaagcggcgccaaatctccgctcgcccccagtgacccttgctgcgggatgaccgggtgaatgcgatgattgagaaacgcgagcagttgatcaatcagctcagtccgtacgccggaaaagcctttcagcagggcattggcgcgcaaaagcagcatggcccgcgatacagattccggaaacggatcaccgacgccgcacgcgtgagaaagaatcagattcagctgcagatccgcggcgtcttctttttgaatcagcacatcgctgaacttgccgaaccccgtcgtaatcccgtaaatggtcttctcttcttgaacgatccgttcaaccgccgccctgctttttttcacacgttccatgctttcggcagatgcttgaacctcttcaaaatcaaacagcacacgctgggcatctgcggttgtcagtgaggaaccgtctaacgttaccatcatttcaacccctttttctttactttggtaaagcgcccatacaaaaaggagctatgccatgaaaatgatatttcacgcatagccccctatcatctgatatctatgggctgattcatatgtgattaattccgactccgaatgtttcgtgctcaagccccttaatcggagctccgatcgtgccgtaaagggaaacggcgatccaatcgccttccgcctcgctttcatacggatttccccgcaagacggcaaacttcaggcccacggtacgaagcagcgagccaagcagcatttcgccccgcgtcactccgtgcaaagcttccattgtggcatgatacagcgcatgtgattcgcgataaccctcagattgaatgacgccgctctttttggaagcggtttcaattgcagctaccaccttatgcgcatccattgaacccaccctgccgagacagactttccagccgtcccgttccagccggctgatctgctggttttcttcagtctcatgaagcagaagaaggacggacaatcgcccgatgcggcggtctttgtgtaaggtcatatatgcttcactcaattcttaaatattctgataactagtaactgttttttatattaagtgtttgcgaatcagaagtcaaaactttttttccagtctttcacaaatcagattgctattgtattaaagcggtacatcgggaagccggcgctgttgatcacatatttccgccatccgcgtcataaaatagagcgttgtcttgaaagcgttttaagaaaagaagagagcgaggagatttcagaaaatgaaaaccagtttctttcgtgtgtgcctggtctcagcagcggttatcgggttcactctgccgcaggcaaaagcccagcatcccgttttttcagaggtcagcgtgcatgatccgtccgtcatcaaaacaggcgatacatactatgtattcggctcgcatttggcttccgccaagtcgaaaaacctgatgcagtggcagcaactgtcttcaagcgtcaatcccaataatcccctgatcccgaacgtctactccgaattaaaagagacattcgactgggcccagtctgatacgctgtgggcgccggatgtggctcagctggctgacgggaaatattacatgtactataacgcctgtaaaggagactcgccgcgatccgctctcggtgtcgccgtgagtgacaaaatcgaaggaccctacaaaaacaaaggcatctttttgaaatcaggcatggaaggaaaaagcgaagacggcacgacgtatcatgcaaacgttcacccgaacgtcgtagatccgcaaacgttttttgaccataaaggcaagctctggatggtgtacggctcttactccggggggatttttatactggaaatgaatccgaaaaccggtttcccgctcccgaaccaaggctacggaaaaaaactgctcggcggaaatcacagcagaatcgaaggcccgtacatcagctacaatccggaaacgaaatattactatctgtatctgtcattcggcggacttgacacagccggcggctacaatatgcgtgtggcgcgctctaaaaatccggacggtccgtactatgacgccgcaggccataacatgcttgacgccaaaggaaaagacggcagtttcttcgatgacaaagcaattgaaccgtacggggtcaaactcatgggcggctacagcttcgcctcacaatctgaaaaaggcacgggctacgtttcaccgggacacaactccgtgttttacgacgggaaaacgaaacgatcatacctcattttccacacccgtttcccgaacagaggcgaagagcacgaagtcagagtgcatcggctgtacatgaacaaagacggatggcccgttgcagcgccgtaccgctacgcaggagaaccggatacacacatatcggcagccgccgcatccggagcctacaaactcatccagcatggaaaagacattacagctacgatcaaaaccccaaaaaccatccggcttaacaacgacggcaccatttccggggaaatgaccggaacctggacaataacgaacagcagcaaagcccgaatcaacctgaacggcacacattatgacggtgtcttcctgaaagaatgggactcagcgagagagaaagaagttgtgacgtttagtgtgctgagcggtgatggggaggctgtttggggagtgaagtgaaaaagcacctactccagtttggagggtgcttttttcttgctaattaggagaatgaccttctattgcttttaataaaccatttgaattatgatggactcaacctctatcgtttacagtgaacagtataaaattgataacaaaaatatgaatacatacctaagaaaaaacgaaaggaagtttaattttgaaaaaaacaataaaagtagccgccgcagttatacaaaatgaaaacaatgaaattctatgtgctctacgttctccaacaatgtctcttcctaatctgtgggagtttcctggtggaaagcttgaagaaggggagaatgctcgggaagcacttgtaagagaaattgaagaggaacttgattgtaaaattgttacgggcgatgtgatagctgatattcatcatgaatatgagaaggtcatcgtcaatttaatttcaataaaagcgaggattgtatcagggaagccggtagcaaaagagcatgcggaattcagatgggtgcctattcgtgagctagaatcactagagtgggcacccgctgatcttccgaccgtatctgctttaattcgttaaatccacatacaagttttctgggacaggctgatggagcttccatttgacattcattggcttgtctccgtggcttgatacgtaatccgcttctcctaaataaataaatggtaaagtgatgttgtgcatttcagtgaatttcctcacaaataaatgaatatggtatcctttttccttatggtgaataaagttttgccctacgcttgatatatgtgaggtttggttttgactttgccagtgaaaatggctaggatcaataaaataatctttatatagcaaatgatcttctactttttctgacttattcaaattgataaagattaaatagtgatttttaactctacgtacaccctctcgccaagtcccttcctgatcagttgactgaaaaagataaatgagctcatttcttgtataggtctgatacaatgttagcttaatctcttttgaagcaagggcttctatattgttcatacgtctaaattcaatcagtccatagtggacgcgctccttaatatacggtccgaataatggatcggttaaaatctcgcttacttctggatctaacttgaatgtatcaccttgtaatgtaccaaagcgccaattctgtttttgatctgatttcgttaaacgctccattgctcgctgaatgaggtcatcatgtgtatctgttgtgatttgaatatgaaactgtttttctaacgattcttttacatcttctattgtgatgatatttttgtgaaaaccgctctgtaaaattaaccattcataaggccatttaataggtaattgctgttctaatcttgctactatccctacaaccaaggggttattgagaatcccttcatctgtaacattcaaatcgtccattttctttttggtctgtacccacgatttgtatttctttataaaaaaggtaagcccaggtgcctgttcagagtatagaaaatcaattaattctggagagcgccctagctcttgtttaaattgcttgtataacgttttcagcatggcatctgaatttagtttaatgtgatcgatcttatttaaaatttctttcttcgttatggctgaaaggtcaacataagatcctccaggtaaatctgaaaactcatgcgtcacggccactcggagggaatctttatcaaaagatttttggcttgtttgtccagatagtgcgagtggaataacgaatgacttttgatagtttccgataaaatccagtatcgttacaaactctttgtcgtcagtttttctaagtccccgtcctaattgctgaatgaaaatcgttggtgattccgttggtctaaggaacaatagtagattgagctttgggatatctattccttcgttgaaaatatctactgtaaatataagttctaaactgtggtgcgggtcctctaattgacgaatgacctcttgtctttttgcaggagaatcatttcctgttaaataagttgtataaaaacccaatttattaaattcatcactcatgtatattgcgtgttcgacgtttgtacagaaacctaagccaaccattttctcgccgtggaatccatacatgttgatcatcttgatgatatattctactcgtttatgcgtttttaaatgattgactagcgatttctcttcgtacagtccgtttttcacttttactttttcgtaatctacagtatgatctgaaattccaaaatagtgaaatggcgcaagtagctctgcctttagggcatcgcggagtctgagttcataaacaacattatgatcacaaatctgaagcacatctttaccgtcaagacgctctggtgttgcagttaaacctaataaaaactttggtgtaaagtagtttaatacagcttgataggtagatgcttctgcatgatggaattcatcaatcacaatgtagtcaaactcatctgttgaaaaagattccaaagtatcttttttatgtaacgtttgtatagtgctaaataaaaaacgcttatctctttcttttttcgtgccagtcaataagccaaaatcttcatgattatttgtgactttcttgaatgtttcgattgcttttgaaagtaactcttcccggtgggcaagaaaaagatatttatttggtttaaattgctcaaaatcaaatgctgctaaaaatgtttttccggttccagtggcggcgatgatgactgcttttgtctccccttcgtttcttgtttttttaaggtttcgtaatgcttccttttgcatggcattcggggacattttcgttttgtaaagagagttttgagcagcaaaggaagcacttaccttttggcttccagcttggaattcctcataggcttgtaaaaattgttcgtcaacaggctgtgtcttttcattccaaacagtgtcaaacaaatcttttgtttgttgataaacggggagatatctggtttcaggtagtctcacatttaactcatacccagtcgtaagggcagcttgtgatagatttgaagatcctacaatgacactatgctgtccagaacagcgttcaaataagtatgctttcgtatggaaagattttttatattcatttacaattctcaactcaacattttcaaattgaagaagatgtcttaacgccttcggttctgtaatacccatataggtagatgtaatgatgcgtacagggacatgtcttttagcaagctcctgaagcggagggatcaaaagctgaacaccagaccaccttgtgaaactaaccataaagtctacccgatccgccgttaacatttcgtgttttattgctttgaaaaagttctcatgagtttgatgatttcctagcagtttcagacgatgtagagaaaattcctctgaaataggaagttccatttcatttaaactataaagcactgtggaaagtggcaatgaaaaattcgtatgttttccaagctgagaggcgaccttctcgctcagctgaatcgcttgttcatattgatcttgatccacaagtgtttgaaatgtctcgctcagttgttttgccgtatgtaaagtcaaaacttctgcatattcttttgggctgaccggttgaatgcgatgtgatgttggataaagtttttgttgttgctgaatttcctcatggaagcctctatgatttctcatcataatctccttttttatatcaataattccattttatcactacttttaccaataggtaatactgaaaaagaagagaataaagtcctatttattaagcgcttaaaaaataacgctgaggtagtttggtttggtataaagacgtcatcgccacaaacggagaaagtctgtaagcgcaatgttccggagaaagccggcaaaattgacattcagcaaagagaggaggacaataaaagcagaaaggcgggattcatatgtttaaaaaaattcttgcagcagtagacggttcagacatgagcagcaaagctttggacgcagcgatccatctggcgaaagaacagcaggctgaactcaccattctttatgcgggacgtgaagccgttgtctccacatcagccttaacagggattgtctatgttccggaaaacttcattgaagacatcaaacatgaagtcgagcaaaaaggagcggccattctggaaaatgccaagcagaaagcggctgaaagcggggtaaacgcggaaagcctgtacgtccaaggcgaacctgcgcatcaaattttaaacatagcgaaagaacagcatttcaatctgattgtcgtcggaagccgcggaatcagcggatttaaagaaatgatgctcggaagcgtgagccataaggtctcacaattgtctccttgtcctgtactgatcgttcattaaacagaagaccctgctgatgcggggctttttttaatgagaaaagaccgccgtctttcgaaaaataggatgaaatcttcctctgaatcaagtaaaatggctgttagtatttgtctgaataaacagtcaatgatatgggggaagcaaatcaatgcaagctgaacaaacatcaaatgccgtcatcaaaatggtcatttccatggtcattttcggatcaatcggctttttctcggaacatacgaatgttccttcaattgaactggtctttgtgagatgtctgtgcgcctctttgtttctgggcgtttgctggtttggttccggacggcaccgcaccgaacaatggaaccggcgcgaggtgttgcagacattggcctgcggattttttctcgtgctgaactgggtgtttttatttaaatcgtttgaggagacatcagtgacgatagccatttccgtttatcatctggctccggttctcgtccttcttctagggagccttatataccgggagaaactgcatattgtgtccgtcacttccatcgtgatttgttttctgggcaccgccctgatttccggcatcaacggaaatacgtcattttctcagctgatgggatcgggtattatttgggccgtgctggccgcccttttttacgcctttacgacactggccgggaaaggtatcaacagtctcagcccatatgcggtcacctgtttgcagaccgggttgggcgttatcattcttctcccgttcgtccgtttcggcgctttttctgatttgtcgcatgtgaactggatcatgattgtgtcaaccggtatcattcatacgggaattgtgtatttgctcttttttgacagcttgcggtttttatccacccggtttatatcaatcatcgtatttcttgatccggcggtggcgattgtgcttgacaccgtatttacggggtttcgccccgacctttatcaatctttggggattgtgttgatttttgcgggaatggcactgtccctgattcgaaagcaaaaagccgtgccggcggaaactcaggcagacagcacccgtatataggcggccgtatcggctgctttttttgttttggggcttttcagccataacgaaaaagcagacaaacagatcatggaaaaagaggatagtaattgtataatacttcatgtgtttgcaatttaagagattaaaggagtgaagggcatgaaaaagaagacgcgtcatctcgctttcttggctgcactcggctttgcgctttgtctggccatcgtatgttccgcatccaagcaggcagaagcggcagcggcttatccggatgtgatgcagggacttaccggattcgctggcaatgcgaaggatcataacggaaaagcaaaatccgccgtatcgggaggccagggcggccccgtcgtctacgtcagcaatctcaatgatctgaaaaacaatgcgggcggaacggaccgcaaaaccatcgtcatcacaagtgatatttcttccccggggaaagccgttgtgacagtcggcgccaataaaaccatcgtcggctcttataccagccacaggctgaccaacatctatctgaccaccggctccggatcaaacaatgtgattttcaaaaatctcattatcagccataatgccgccattacaggcaacaacgacattccgatgtacatagcgaacgggcagaattactggattgaccacgtgtggtttgaaggacacagctacaatccgaacagccacagcgatttgggaaagcttctgtatgtcggcgccaaagcggattttgtgacgctgtctaactctaaattcacagaccatctgtacggcctgattctcggttatccgaatgatgataacgaaggacgcaattatatcggctatccgcatatgacgatcaccaacaactattttaataacgtctatgtgcgttcaccgggcctgatgagatacggctattttcacgcgaaaaacaactatgtgaccaatttcaatttaggattcaccattcatacaaacgcgactgtcttctcagaagccaactatttcggtaacggaaatgaaaaaggcggaatgatagacgactacgggaccgcccaattcaccgacaccggttcattcccgtcgctcaaagccccgaaatcaccgcgcaccggctggaatccgagatcaaattacagctacggcacgctttcagcccaggacgccaaaaacttcgcccaatcctacgcgggagcgcaaaatacaaatctccgctatccataatacaaaaaaccgccggcagccggcggtttttttatatgaataaaaggttcaaaattcctataatccttaaaataaccttaaatacctaggaaaatattgataaacaatttcaataatattactattgttaagcctatattacaaaagaaggaggagaacctatgaaaataggaaaaaagaacaagtggaaaaaatggctggccggcactcttgcggcaacgcttatgatttccattgcgcctgccgatgtatttgcggcagaaacgcgtgaaaaacaagatcaagcgaaaaccgccgccattccggcagcagacccggaaaaagatcttccggcggaaaaagcatccgagcagatgccgtttgatcaaaaagatatcaatcaagacggtgagatcacgtctgaaagaactgagaattcaaaactttattatgagggcgagggtgtatacaaacaggaaatctacacagaccccattcatacgaaagaaaccgccaatgcggactgggaagacatttctcctgaattgaaaaccggctcaaaggatgtcgggacggaaaatacagtgctgaactccgattttctgaagcaaatgaaaaacggattatacgctacatttgaacacggtgatcataagctcacatactcattaaccggcgcaaaaggccccgatcaggctgcaatcactccgacagatgcctcagcaaaagtgaaggaagacagcaacgagcttacgtatcagcaagtgtttcctgctattgatttacaaacctacacatttaacgaaaacataaaagaagaccttgtgcttcacaaatatgaaggctacaattccttcacctttcaaatcaaaaccgaccttcaggctaaagaacaggaagacggctcgatcgcgttttctgatgacaaagacaatgtcgtctacaccgtgccgaagccttttatgaccgactcagatctcgacgagaagtcaggtgaggtcagcaggtcagaagatgtcagcttcaagcttgaaaaaaacagcgaaggctacttgctgcatgtaacggccgatgaaaaatggctgaaagatcccaagcgggtttatccggtatctattgatccttccacatcagtatccgtgtcatccgatacctttgtcatgagtgcgtacccgacgacaaactactctgccgcgtcgcagaaatgggaggccggattgaaagcgtacgtgctgaaaacaggttattatgacggcacaaccggaacgaactacgcatttatgaagtttgataatctaaagccgatcaaaaacatgacggtgacaaaagcgacgcttaaagcatacacagcccactcctattacggatcaaaggcgacggggctttggctcgacaccgtaaacagcaattacgacaatgccaagatcacgtggaaaaacaagccgggctccaaaaacatcggcaaagccgaggtctataaaggccaatgggcaagcttcgatgtcacatccgcagtcaagtcgtggaacagcggcggcgccaattacggctttaagcttcacacaaacggcaacggaaaagaatattggaagaagctgatgtcatcagcaaactctgctaaaaaaccatacattgaagtgacatacacgattccgaaggcggacacgccgtctgtcaaagcgtatcataacggagattcgacaggacttttcaatatcagctggaaaaaagctgaaggcgccaaaagctataaagtgtggctttataacgggaaagaatatcaagccatttctgtcggcaatgcaacctcttggagcacaaaaggaaaaaacatctggccgacaaaagcagaaatcgactccggcaaatataagctgcatacagacggaaaaggcggaagtgaattagcgcttaatccttcgccggtctataaaaactccggcggcagctatccggcaagtaaaaattactgggtcgcggtcagcgcggtgtttgaccagggagaaggcgccatgtctgcggccgccaagcccgtcattccgaatattggcagagttcagaaaccaagcacgaaaggctttaataacaacaacgccacaggctggtttgatctttcctggaaagccgtatcaggcgcagccgggtataaaatgcaagtctttaacggcaaaagctttgaaacgcttgacctcggaaataaaacatcctggtccacaaaaaatcaaaacatctggccgacaaaggcggaaatcagcgccggaaaatatgcgcttcacctgaaagacaaaaaaggcgcggaattgccgatcaacccgggccccgtttataaaaatgccggcggagacgcaaaccggaaaacatacggatttaaagtaatcgcctataacaaagacggagaagcgatcgcctcaccggaagctagtccggcgctgcctgatatcgcaaagccgaaaaatctgacaggctacgtctatacgaacacgaaatcgagccaaacgggttatgtcaatctcatatgggataaagtcaaaaacgccaaaggctacaaaatcaacatctacaacggaaaagactatcaatcattcgatgtcggggataccgatcattggacgacccaaaacaaacacatctggccgtcagccgatgaagtgaaagcgggaaaattccagcttcacacggacggaaagggcggcgaactggcgcttgacccttcacctgtttacgaaaacgcaaacggcaattacaaagggaagaagaactattcctttacgctgaccgcctatgacgcaaatggtgacagtataccgacggcaccttttaaccctgttttccatgaaggtgcggaattcctcggaacggaagaattctggtctattatcgacattccggacggacagctgaacggcgcgacgggaaatgtcatcgtcaatgaagaagatatgtcaatcgacggacgcgggccggggctcggactctcccggacctttaacagccttgacagctctgaccatatgttcggccaaggctggtatgccgatgcggaaatgtcgattctttctgaagacggcagagccgtttatattgatgaggacgcgacaacacatgtcttcacgaaaaaatctgacggcacgtatcagccgccgacgggtgtttatctcgaactgacagaaacaagcgaccaatttgtattaaaaacaaaggatcagacgaacgcttatttcagcaaaaaaggcggcaagcttcaaaaagtcgttgacggacacaacaacacaaccgtatacgaatataacgacagcaatcagctgaccgccataacagacgcatcagggcgcaagctgacatttacctatgatgaaaacggccatgtcacatctcttacagggccgaaaaacaaaaagatttcgtattcatatgacaaagaccttctcaaaaaggtgacggatactgacggcagcgtcacaagctacgactatgatgccgaagggcgcctcgtcaagcagtattccgcaaacagcacggatgacaaaccgctgttcactgaataccaatacagcgggcaccgcctggccaaagccgttaatgcgaaaaaagaaacgtatgattacagctatgacgccggcaaaaaaacgctgctcatgacgcagccgaacggccgcaaagtgcagtacggctataacgaggcgggcaacccgattcagatgatcgatgatgccgaagggctgaaaatcacgaccaacactgtatacgaaggcaacaacgtcattcaggacaccgatccgaacgacgcggatgcgggcaaagcgacagaaagctatcaatatgataaagacggcaacgtcacagccgtaaaagacaactacggcaccgaaacgtatcagtacaacaaaaacaatgacgtaacgaaaatgaaggataccgaggggaacgtcactgatattgcgtacgacggacttgatgctgtttctgagacggatcaaagcggaaaatcctcatccgccgccgtgtatgacaagtatggaaatctcattcaatcaagcaaagagctggcagcttcggcaagcctgctgaaagacggcagctttgaagcaacaaagctgggctggaatctcaccgctacgagagacagcggaagcatcgcgtctgtaaaagcaagaagcggcgcgctgtccggacaaaaagcactggagatcacctcacaatccgcttcagccggaacagagcacggccatgcgtccgcaacgcaggaagtgcagcttgagccgaatacgacgtatacactcagcggccagatcaaaacggatctgacaaaggcgagagcgtatttcaacattgatctgcgtgacaaagaccaaaaacgcattcaatggattcacaatgaatcaggcgcattagccggaaagaatgactggacgaaacggcagattacctttacaacaccggccaatgcaggaaaagccatcgtctatatggaagtggatcataaagacaaggacggcaaaggaaaagcgtggtttgatcaggttcagctggaaaaaggcgaagtctcttcaagctataacccggttcaaaacagcagtttcacggctaaagcagatggctggagcacaagcggagccgccgctgaccttgatgaaggcttcgatgatgacagctcattaaaagcgtcccgcacaaatgcatcacaagccaatgcggccgcaaaacaaaccgtcacattaggccaaagcgcggacgataagccggtatatatcacgctgacagggatgtccaaggcagacggcgtaaaattaacgaacgacaatgattacgcgcttcaggccggcgtcacctatgcggacggcacgacgggcgtctacaccgccaaattcccgcaggggacacaggaatggaaccgggcggcggcagtcattccgaaaacaaagccgatcaataaaatcgaaatcagcattctgttccaaaaaagcgccacaggaacggcgtggtttgatgacatccgattaatcgaaggaagcatcctgacgaaaaacacctatgacgaaaaaggaaactacgtcacaaaagaagaagacgaactaggttatgcaagcactgcttcatatgacgagactggcaagaaaatgtctgaaaccgacgcgaaaggcgaaacaaccgcctacgaatacgatcaggccgaccagctgacaaagctgaccctgtcaaacggcacatccatccttcacagctatgacaaggaaggaaatgagctgacaaaaacgattcgggccggcgcaaaccagacctatcaatatgaatatgacgtcatgggcaagctcgtcaaaacaaccgacccgctcggcaatgtactgaagagtgaatatgacgccaacagcaacctgacgaaaaccgtttccgccaacggcaatgaagtgtcgctgacctatgacggcaccgaccgggttaagtcaaaagcgtataacggcactgaaaaatacaactttacctatgacaaaaacggcaatgaaacgtcggtcacaaacaaagaacaaaatacaacgaaaaaacgcacctttgacaacaaaaaccgcctgaccgaattaaccgaccgcggcggcagccaaagctggacgtatccggctgattcagataagctgaaaactttctcatggagccacggcggccaaaaaggaacaaacagctttacgtacaacaaacttgatcaaatgattgaaatgaaagacggcacttcagcctatacatttgattatgatgaaaacggcaatgtccagacattcatcagcggaaatgaagtcggcacgagcttctcatatgatgagcggaatcttgtcagctctcttcatatcggagcgaaaaacggcggcagcatcttccgggaaagctatgaatacgacgccaacggcaaccgcacggtcatcgacagctcagccggcggaaaggtgcagtacgaatacggcaagctcaaccagctcgtcaaagaaactcatgaagacggcaccgtcattcaatatacgtacgacggcttcggcaaccggacaaacgtcaccaccacaaaggacggcgcaagcaaatcagtcaacgcatcattcaatatcatgaaccagctgacgaaggtgaatgacgaagacctgtcctatgataaaaacggcaaccgcatatctgacggcaaatacacatatacgtgggacgcggaagacaacctgaccgccgtcacgaaaaaaggcgaagacaagccgttcgcaacatacaaatacgatgaaaaaggaaacagaatccaaaaaaccgtcaacggaaacgttacgaactacttctatgacggagacagcttgaacgttctgtatgaaacagacgccgacaacaacgtcacaaaatcatatacgtacggtgacagcggccagctgttatcctatacagagaacggcaagaaatatttctatcactacaacgcacacggcgacgtcatcgccatctcagacagcaccggaaaaaccgttgccaaatatcagtacgatgcgtggggaaatccgacaaaaaccgaagcaagcgacgaagtaaaagacaaccgctaccgctacgcaggctaccaatacgacgaagaaaccggcctgtactatctcatggcccgctactacgaaccaagaaacggtgtattcttatcactagacccagacccgggcagcgatggggattctttagatcagaatggatatgcatacggaaacaacaacccggtgatgaatgttgatccagatgggcattgggtgtggctagccattaacgccggctttgcggcttatgacggatataaggcatataaatcaggtaaaggatggagaggtgcagcctgggcagcggcttcgaactttggtcctgggaagttatttaagggtgctaatcggatttataaagctgctaaaacatataaactatctagaaaaagtgtacgggctagaagggcctactcaagttatagggatataactggaaaaacttctaggttcaaaaattattctactaatgtaaaaagaagaacttttgaaaaaaatttaagaagacaaggatggagaaaatcagttcatcatgggggtgttatcactatgacgaaaaatgggaataagtattccctaaggaaacatgctaagtcaagtccctatccaaccgcggaatatacacctaaaggtagaaaaaaattcacacacaaaatcagaatgcgacattaaaggggaaataagatggatcactattttattgatcatcctaaggagttaaaagtctatcaatccataattaattccttatgtcacgtagatcaaacattgcctaaacaagtttttaagcaaaggaaaaattattatttattcgaggaattccattgggtattatctgaagaaagttggggaatgtttaagagtttggctaatgaacatcatgatgagtttatattaatggctgttatagacagttctgaacatataaaccaattctacgaagaatttgagtattttaactggataaagatccctttgcatataactgcagatgagtatctgtcactcttaactgattatccaaagcacagtaaaagtgactgtataatgaatattgcatctcgtgttgtttgggcttcaccgactttaaagtgggcgatttatggtgagagagaacttgaaatctgtattctaggtattgatcatcagagtgaaggaaaagaactagcaacttggagatcgttagatggcgttgtcttagattggatatcagttgtattcccaaatcagacggttccagttgaatttgaaaaaacacttacggcacattacaaataagtatatttttaatacctactaccgatatcatctgattgttctaaacgggatttcaaataatctccagatagtatttttgcattcaacagatatttaatgacaaatatgcagagtaatatatttttggggcttgtttgaataatctatgtttatcatcaagacacttctatcaatgggtttgttagtgttagttaggagaaggagaagacaatgcacaaacaaattgaacaatagagtagattatattgacgagggatgtaatattttaaaggtcgattatcagttctttaaaaaagacctgttttaaggttcaggttgttaaaaatgcagcatctgtttattttagtgcagatattggtgatatgagattagaaaaaatagattcggaagaatacaattggcaagtatttgagatgagttaccacccggaaggaatcggtaatctatcaaatgctgtaattccggagtatcaatcaaatgctaattttctcattgacatgaacagaatgctgattgctgtagaagctgaaacagttcgctttgacgaccaatcattttatgcgtatcatccgaaatcataaataaacaaataagagaggttcccagcctctcttttcttacataacgaaatcgttcgcggaggcaaacatgaacactcctttaaatttacaaaaagaatcattgagggctatagggaatctggatgtgattaatccgcttaaatacaattcgatttattcatgtgatctagtgagtaaagatactttttctcaaattaatgaatgacttagagttcgaaacagctctaatagaagtaatggcattcccttcttttattgaagaatggaagaagaaggttgaaaagaaaatgataaatatgaatactgtatcgaaaaagttcattcatattgaatgtgtcctaaccaaagaagaattgatggcagattacttattagatgaattatattttttagcatcgatcaatgattttgttgttataatagcaaaccctgccaaaaataagtcctgcatgaacctgaacactcaaaaggttgatgtaactactgaaagtaatgaaaaaatcatttggtttgaatacgatgcagcagatttatatatcattgattaatttaatataaatttcaggttcctattcaacggagtgttgctgatgttaaaacttaccgcggagcgtgttgggtcatatgaaagggaaaatatcatttatttcaatgcgggtcgggatgatcaagtatttattgtgtcggtgcacgatcacaaagtaatattggaggttatgaaaggcagctctcttttaatcaaaaaagagttacacggattttctgaagatgcccatttctatctgattgattcgtatgatgacactatcgtgatcgtttacctggagaatcatacgtgtcaattggctgcatactgcgtaaacagtaataaaatcaatccgatttgttcttttctattaagcgccaatgtatttcatctgggtgaggatggattattatggatcggattaacggacgagggtatgtatgatgagagaaatcctcaaggaaaagcgatatttgcttttcatgcagaagacagaacgttttattttgaagacgattttaaagaaatgatgcacgaatgctatgccgtacaatcgatcaaatctgatttgtatgtatgtttcgagggagaggattgctgtgtcatcgggcattatcagattggacgggacagaattcgtactgttgcagaatatgtgctggacggcgatcaatactcctattgtgatcagctatccgtttcgaaaaaaagggtgctgctgattcagagtcacgatgataccctatttgcatttcatgaagagcacaaagagactgacgtcatgatacacggtattgatagaaaaggagaaacaacgtacagagccgtacaggatcgcatgtttatctttagtgataacgatttatatctggtaaagtattgatcaatcctatgcagatggctttttacagccatctgcatatcattttacggagtgaacgatcgatataaataggataccatccaagactcaaggggcaatgacatgaaaataaaaatgaataagatagtcgaagaatcagtaaaaggatgtttttgtcattttgataactgcgggcgtctgtatctcggacggcatcagaatggcgggctttcgtttacgatcatcgacaaatcgggcgatacgcgagtgattcatatcgatgaacaaatcccgtatgaggatattatgctgttccaacagagttcggctgactggtatgtgttgattttctttgaatcgcatgagtataaagtgaaagtattttcagcagaaggaacagaacaaagtgcattttctctcccttcaggggtttcatgcagtcttttggatgaaaaacaaaacctgtggatcggtttaagtgatgaaggtatttatagtgatgaaaatcctgaagggcacagtgtgctgtgcttcactttagacgggcagctaaagaaaacccacattgatcagcagctttcagaaatatatgcgcccgcggtagatgactgttatgcacttgcagaaaaagacggactaatctacatgctgtattacgcttatacagtcattgctgcgtttgaagaaaccgacgtgaaacgagtgtggattatttctgataaagcatattccggggtttacgaccagctagcgatttcagataacgggttttgggtatgcaaagatgatcattcactgtctctcattccggccgatgtcagtctgccgatgcaagagataacgtgctgtgatgcggatggcgatgagctttccgggcatcagctgaagctgactggcgatgccatttacgcggtctcgaattcagggatttataagcgggatatcagtaatgggaaagcggctaaatgagatgttaagatccaacagatattctttaaataatgacgtcatcagaagcttgaaattacacaaaaaagaattagaggggccgctgccttcagatgcagggagattcgaagaagactttgagggtgctgcctgcgctggggatttttatgaatacttcgcacttgtctgcggcagcttagattttgttttggcgaataaacaaatgcctgcacggcagcgtaaagccttatataaatccttttttgagctgtatccgcaatatgcgcagctgaaaaacgctttgatggattatccggagctcagccaggaaatcgggcggcacgaacgggccaggaggctgttagtcagcattttaaacaagaaatgaaaggcaggattttgacgtgaaagaacccacaagagcagaatgtctgaaaaaggctggtctgatcctgaacggtcaagcggcgagggaagaagtgtcggattgggcgtctgagtatgtgagtgcaggtgatccggcggatgaggacgaaaccgtttgggagatgctcgtatatttgagcgggtttgatctgaaagattcgcctgatgcgtatctgcatacgatagaagaattaagagattgggtgcaggaatataaagaagttcatggggatttgtaagaaaaaaattcatttgagtcagacatgtcaattcagctgaaaaaaaggaggcgcaaaatggaatggcacaaacatgagaaagcagttctgccggggccaggttcgccgggttgttttgaattgacggagtttacgttctataccgggtataacgagtattatgataaaatcccggtgtttgagctgaagctgactgacggacagtatgatgccgtgctgcggtttgaggatgtgaggtctgcccggctggatgatcttgaaagcatcaccgacatccatctggatatcagcccagtcgacggcggctgggaatcgatccgctactatgtcgatgacggggaaggaagtatgagcttttattgcgccaaatgggtcgtgctcgacatgaagaaaaagcagtcccccgaacggcccggcaaaacgtcagggtaaagcggcggcatttcgcgtataatgaggggagccggacagagaaggagtttagtcatgaatgagtttaatgaatatgcgatcagccccgagatccgacgggcgctgaatggcttgcaatacaccgagccgactgaagtgcagcggcgcgtcatccccgccgcgctgcaaaaaaaagacctcgtcgtcaaatcgcagacgggcagcggcaaaaccgcggctttcggcattccgatctgcgagcttgcggagtgggaggaaaacaaaccgcaggccctgattttaacgccgacccgcgagcttgcggcgcagattaaagaagatatcacgaatatcggccgtttcaaacggataaaagccacggcggttttcggaaaagcttcttttgacaaacagaaaaccgaactgaagcaaaaaagccacgtcgttgccggaacgccgggacgtgtgcttgatcacatagaaaaagggacgctgccgcttgaacggctggcgtatgtggtgattgacgaagcggatgaaatgctgaatatgggatttattgaacaggtggaagccatcattcagcatctgccgaaaaacagagtcaccatgttgttttcagcgacgctgccggatgacgtcgagaagctgagccgcacatatatgaaagaccctgaattgattgaagtaaaagcggaaggcctgacgacaaaagacattgagcattttgtcaccagaacagaagaagaggataaatcatctttgctgcgtgatgtcctgatcaccgaaaacccggacagctgcatcatattctgccggacaaaagaaagggtcatccagttaaccgatgagctggacaggctgggctacccttgtgataaaattcacggcggcatggtgcaggaagaccgctttgacgtcatgaatgaattcaagcgcggcgagttccgctatctcattgcgaccgacgttgccgccagaggaattgatatcgaaaacatcagcctcgtcatcaattatgatattccgcttgaaaaagaaagctatgtgcaccgcacaggcagaacgggccgcgccggacaccgcggacgggccgttacgtttgtgacgccggctgaatcgcggtttctgaatgacattgagacatatatcggtttccgcatccaaaagcgggaggcgccgtccgagaaagaaacagcggaacggaaagcggcttttgcggaaaaattgaacgcccgccccgatgtcaaaacagacaaaagcgaacagttaaacaaagacatcatgaaactgtactttaacggcgggaaaaagaagaaactcagagcggtcgattttgtcgggacgatcgcgaaaatcgacggcgtttcagccgatgatatcgggattatcacgattctggacaacgcaacatacgtcgaaattctgaacggaaaaggcccgcacgttcttgacatcatgaaaaatacgacggtcaaaggcaaaaaactgaaagtccataaagccaagaaataaaatagaaagcctgccgcgtgcaggctttttttacgccgtttcctcaggcacaaacgcaaggatggcaatgccgatcacaaataacaaaatcaggctgaacacggcggctgacgaatttccggtcagctgggcggtgacggcaatcaaaagcgggccgataatcgaagcgaacttgccgaagatattataaaatccgaaaaactcattggcgttctgtttggggacaagctttgcaaagtaagagcggctcagcgcctgaatacctccttgggaagtggcgacaagcatagccaaaacccagaaatcaaaagcggaatccataaaataagcatacgtgcagacaatcatatacacgccgattccggcataaagcattgtttttcctttaaaccgttcggccagccgctcgtacaaaatcgaaaaaggggcggcgacgacctgtgtgacaaataaaacaatcagcagatttgccgcgctgatgccgaggtcagccccgtatgacgtggacattgtaatgatggtgccgaccccgtcgatatagaagaaataggcgagcagaaacaaaaacagcgcccggtgcttcctgatctgcttcagcgtgccggccagccgtataaaactgctgatcacaagccgcggctccctctcgatataatagcgctggcggacgcggagaaggagcggaatcgaaaacagtccccaccatgccgccgtaattaaaaaggcaatgcggcccgcagtctgggcggacagcggaatcacctccgcttgtgctgacagaatcacggcaatgctcaggagaaaagggattgtactgccgatatagcccagcccaaaccccctggcggacaccatattcatccgctcctttgcggccacatcaacgagaaacgcatcataaaacacattagatccggcaaagccgatcgtggaaatcgtataacaaattaataacagcatccaagattcgccgggaatcaaagccagcgcggcggtgcccgccacaccgatcagaaaaaagaaggcaaaaaaccgtttcttgcatcctttgtagtcggcaatcgttcctaagacggggctgagcatcgccaaaataaaagtcgcggcggcaatcgtatagcccaaataagcggtggaatcagctgcgctgacgccgttttccgccgccgccgctttaaaaaacaaggggaacaccgccgtcataataatgaccgaataagctgaattggcccaatcatacagcatccagctgctttcttctttcgaaaaccgtttcatcacacacgctccttcccaaaaaccggttctctgcattatatgcgcctctgcctcatcgttggacaatgatttctgaacggcgttttctgattgacctggagatattgacctggtacaaaaaggatgtacaatcaaggtgtagcaggtaaatggtcaggcgggagggagacggaattgaagattgcgaaagtcaataataataatgtcgtcagtgtgctcaaagaaggcaatcaggaattggtcatcatgggccggggcattgcttttcaaaagaaaacgggagatccggcagatgaagcccgcattgagaaagtgctcaccctcgataacaaagatgtatccgaagttcaaaacccttttgtatgatattccgatcgagtgtatgaaagtatccgaggagattatcagctatgcgaaattacagcttggcaaaaagctcaacgacagcatctatgtgtcgctgaccgaccatattactttgccattcagcgcaataagaaagggctggatatcaaaacgccttgctgtgggaaacgaagcggctctacaaagacgaatttgcaatcggaaaagaatcgctgatcatggtaaaaaacaagactggcgtgtctctgccggaggatgaagcaggttttattgcgctgcatattgtaaatgccgagctgaatgaggagatgcccaatatcatcagcattacaaaagtcatgcaagagattttgagtatcgtaaaataccattttaagattgaattcaacgaagaatcgcttcactattatcggtttgtcacccacttaaagtttttcgcgcagcgtctttttaacggcacacatcgactttttgctggagaaaaataccgtcgggcgtatgaatgcacgaagaaaatccaaacttgcattgagagggcgtatgagcacaagctcaccagtgacgagctgctgtatttaacgattcacatagaaagggtagtcaaacaagcataatgaaagcgttggcattattgttcttggattcattttttcttacattcacatatgatcttgttaggattgttgctgataagcatgcaaaacctaaattacaatgagcgcggatcatttctgtttgtgctgatggtaatttaggtttttttaagattcgttattatcattattctgaccgatgttcccttttaacagaatcatgtatgatcgataaagaaatcgctctcaaagaaaggggaatgccgacatgttttatcgtatgaaacgagtgctgctcattcttgtcactggattgtttttgagtttgtgtgcgatcacttctgctgcatcagctcaaacaggcggatcgttttttgaaccttttaacagctataactccggtttctggcaaaaagcaaatggttactccaatggagatatgttcaactgcacttggcgtgcaaataatgtatccgtgacgtcatcaggtgaaatgcgtttggcgctgacaagcccgtcttataacaagtttgactgcggggagaaccgctccgctcaaacctatggctatggactttatgaagtcagaatgaaaccggctaaaaacacggggatcgtttcatcgttcttcacttatacaggtccaacggatggtaccccttgggatgagattgatatcgaatttttaggaaaagacacgacaaaggttcaatttaattattatacaaatggcgcgggaaaccatgagaaggttgcggatctcggatttgacgcggccaatgcctatcatacgtatgcgttcgattggcagccgaactctataaaatggtatgtcgatgggcaattaaaacatactgcgacaagccaaatcccgacaacaccgggaaagatcatgatgaacttgtggaatgggataggtgtcgatgactggctcggttcctacaatggtgtaaatccgctatacgctcattatgactgggtgcgctatacaaaaaaataatgtacagaaaaggatttccgccagcggaaatccttttttaattaaaacgaaataatcccaatcaaaagcgccgcaatcgtcatcacaatcgttgttcccacggcccatttaatagtgaatttttgatggtcgccaaagctgacgcctgccattccgaccaatagataggtggatggcacaagcgggctgagcagatgcaccggctgtcccagcaaggaggctcttccgatttcagcggcgtctattccgtaagcggaagcggcttcggcgatgatgggaagaacaccgaagtaaaaggcgtcattcgacatgaaaaaggtgaaaggcatgctggcaatcgccgtgatcaacggcagatgcggacccatggcatcagggatgagggaaacgagagaatgcgccatcgcatcgaccatttttgtgcctgagagaatgcctgtaaatatgcctgccgcaaacaccattgagacaacgtttaacgcattacccgcatgcgccgaaatccgtttctgctgctctttgacatttggatagttaatcatcaaggcgatggcgaacgcgatcataaaaagaacagggatgggaagcaggctggtgatcagcgcggccatcagagcgacagtcagcagcaggttaaaccactggagagcgggacgcttcagcggcgccgcctccggatcagaagacggcgcgtgttcaatcgaaatgatgccgagacgcttccgttctttttttccaaggagataagcaacggcgatcacccagagaacgccggcgatcatagcgggaatcagcggcgtaaaaacttctgacgtgtccaatttcaaggaagccaaaaccctcgccgtcggtccgccccacggaataatattcatgacgcccgaaccgagcatcgcaatccccgccagcaccaaacggttcatgccgagccgtttgtaaaggggcagcattgccgcaatcgtaatcatatacgttgttgtcccatctccgtccagcgaaatggtcatcgtcagaaccgctgtgcctacggcgatttttaacgggtctcctttgacaaacgataagattttggcaatgagaggatcaaacaggcctgagtcgatcataatgccgaaatacaggatggcgaataacagcataatcccggtaggagcgaggtctgtaacaccctgaatcatcatcccgccgagatctttgccaaatccgctgatcagggcaaacacaacaggaacgacaatcaaagcaataagtgcggaaagccggttagacataataaggtacataaaaacaatcatcatcacaaaaccgagtatggcaagcatgatatgacctcccctgttcaacagctgttttggtaagcgctttcacattttgtttctgtgaaaatggcttatttcaaaatgtgtatgaccgcatatgtaaatacagacctaaaatcctaatgagcggatcagcagtttatttaaagaacgccgcgggtaaatgtgctgtagaatgtttcgttttaaaagggggaactgacatgagtgatgatcaaaacaaacgagtaaatgaacactcaaaggacgaacagctggagcagtaccgatctgataacagcggcaaaaaaatgacgaccaatcaggggcttcgcgtgtctgaggatgagcattccttaaaagcgggcgtccgcggccccacgctgatggaggattttcattttcgtgaaaaaatgacgcactttgaccacgagcggattccggaacgggttgttcatgcacgcgggtacggcgttcatgggcattttcaggtgtacgaaccgatgacggaatatacacgggcgaaatttttgcaggacccgtccgtcaaaacacctgttttcgtccgtttctcaacagtggcgggctccaaggggtcagctgacaccgtccgtgacgccaggggatttgcgacgaagttttatactgaagaagggaactatgacctcgtcggaaacaatattccggtgttcttcattcaggacgcgatcaaattcccggatctcgttcacgccataaaaccggaaccgcacaatgaaatgccgcaggctgcgacggctcatgatacgttctgggattttgtcgcaaacaatcctgaatccgcgcacatggtcatgtggacgatgtctgaccgcggcatccctcgaagctatcggatgatggagggcttcggcgtgcatacgttccgtttcgtcaacgagaaaggaaaagcgcgctttgttaaattccactggaaacccgtgctcggcgttcattccctcgtatgggatgaagcgcagaaaattgccgggaaagatcccgatttcaaccgccgcgacctatgggaaacgattgaaaacggcggcaaagtcgagtatgagctcggtgttcagatgattgacgaagaagatgaatttaaatttgatttcgatatccttgatccgacgaagctgtggccggaggagttggttcccgtcaagctgatcggaaaaatgaccctcgaccgcaatcaggacaatgtctttgcggaaacggaacaggtcgcctttcacccgggaaatgtcgtgccgggcattgatttcaccaatgatccgcttcttcaaggccggcttttctcttatacagatacacagctcatccgtcttggcgggccgaattttcacgagattccgatcaatcggccggtctgcccgttccataacaaccaatacgacggctaccaccggatgacgattaataagggccctgtcgcctatcataaaaattccctgcagaacaatgatccgtcgccggcctcagaagaagaaggcggatacgttcattaccaggaaaaagtagaaggcagaaaaatccgccagcgcagtgagagcttcaatgactatttttctcaggccaagatgttctggaacagcatgtctcccgccgagaaagaacatatcatctccgcgttctgttttgaagtcggaaaagtgaacagcaaggatgtgcagcagcaggtggttgatgtcttcagtcacgtcgacgccgggcttgccgagcgtgttgcgaaaggaatcggcgtgaacccgccgccgaaggaccgtgaatctgatgaaacgttcacttccccggccttaagccaggaaaacacggtgaagacggcagcgacaaggcaggttgcggttttaaccgaccacgggttttctgatgagaaagtcaaacaagtgcttgacgcatgcaaacaggcgggagtcagagccgatatcatcagtcctgtgcttggaaccgttaagggagaaaacggcacggagctcgaagcgtcagccacgttcctgacagcggattccgtcctgtacgacgctgttttcattccgggcggaaaacaaagcacagacagcctcaaagcccaaaaatcggccagagacttcgtcaacgaagctttcagccattacaaagcgatcggcgcctccggtgaaggaaaagaacttctcgccctcgccgccggaaccgaaagcggccccggtcttgttccggacggaaaccatgaacaatttctgaaagccgtggctgagcatcggcattgggacagaaacgtataagaatgaaaaagcgcctttgatgagaggggcgcttttttcttgtgaaagaatattgggagaaaacgaaaattgcttccgtacaaatccgtatcttccgctgtcctggacattcagacaacagttttagagagtcagggcatgcgctatttaaagcaggcgggttgatgaaataatagtttcaccctctttggtttacttccgccctgtgtttgtgtatcttaggggtagattttctggaggagcgattgatagtgaagccgtttaccgaaaaacaacttgaagaatattaccggcgtgacgaaaacatgatgattttggtgtttgcccaatggtgcgtcaatcatgaccttgatccgatggccatttacagcaaagcttaccccggacagcctttaaacgaagagctgcgaaaaacggctgaagagcttgtcgtgccgaaggaggaatcagaaccgattcctgatcaaaccgtcatcggcgttttggagatgttcggcaactccgatttggcggaagccgtttatgaagccattgcgcaaagaccttcacggtaaaagaggcgtggattatccatgtctctttttttcatggagaaaatgtgaaagaaggcccagaaacaatttgctgatctgcgctgtctatagagtgtaatccgttttcaaaaagggaacggtaatgaaaaggaggagttgtgatgaaaaaggcattcaaaatgatggcggccgtgctcttaaccgtgctgacagccgcgccgttcggaggtttcgcgccttcagccgaggccgcgcaaactgcaaagcccgtcgtcaaaagccagacgtataagcatgtaaagcagctgacgtaccccgaggtcacaaatacgggaaacgcatcttttgaaaagaaaatcaatcaggacttcaaacgctatattgaaaactcgtaccaagaatatgtaaaaaacaaaaaagacggtgaaaaacaaggctacaaagcggaataccaggcagatttcaaggtgaagtataatcaaggcggcaagctcagcattcagacggaaaactacagttacacaggcggcgcacacgggctgacagccgttcagacctttaattacgacctggccgcaaaaaaacgggtcacactcaatgatgtgctcaatacaaaaacgaaagccaacaaaacgagagactatctttacggctacatcaagaaacatgacgatctgtttgaccaggacgtcaaaaaacaagagatcatcctgaataacgaaagacctttcttctttacgaaaaacggcattgccgttgtgtttggacaatatgatctcggaccatacgcggcaggaatccgggacgttttcgtgcctgcatccgtctatcaataaaaaaaagcgatatcactctaaaacggagcggtatcgctttttttattttaccagacaaacaatccgacaatcgccgcgctcaataaggaaacggcaattccgctgacaagcagcttccagacgttttttccgatgatggctgacttttcaccatcaagcagagattgataagatccgtagatcataccgatggtgctgaagtttgcgaatgatgtcaggaatgtcgtagccacggcaatcgtgtgcggcggaagtgatttcagctgccctttcagatcggccattgccacaaattcattcgtcgcgagcttgatgcccatcagctgtgcgacatacatcgcgtcatgtacgcctaatccgagaaggaaggcaaacggactgaagatgtatgagaaaatcttttgaatggtcaaaccgtgcatgaacagtccgagtacgccgtttaacgcagccgttaacgccacatatccgattaccatcgctaaaataacaatgaccatgttcatgccgacaagcatactgttagaaatcgtggagaagaagtcttttttctccgcttttgaaggaacgtaaataatatcatcctctttagaaacgtccacgggattcagcatattggcgattaaaagcgcgtttaagcaattcagcgggatagctgtaaacacataagtggacggaaccatcgtcaagtacgatccgatgatcgaaccgctgatgctgctcatgctcatcagcccgaatgtcagaagccgattgttgctgacggcggcaagctgctggcggatgacggctaaagcttccgtatttcctaaaaacatcatctggatggagaaaaagctctccagcttcggcagacgggatattttagaaatcagccagccgattttatcaatgagccacggcagaataccgaaatacgacagcatatcaaagaaggtcacgacgaagataatcggcagcaatgcgctgaagaaaaaatcaaccgtcggattggccatgatagacggaaaagcgaacgcaattccttgactggcgcaggaaatcagccatgtaaagaacgcgccgatcttcccgatgacaaagccgccgacttttgtccctaacataaaccaagtaatcagaaactcaaagacgaggagcatgacaatcggacgccatttaatcttcttcttgttgggagaacataagaaaacaacagccatgacaacaatgagaccgacaatgttcaataaaaagtacatgtgagcaactcctataagggtattatggaaataaaaaaagctcttattcgtcacaaattcctgaaagccagaaagtgtgataaataagagccaaaagaaaagaatagactgagagcatcatatgcttttcactcgttcaaatttatgcaaactttcttgtagtctagtcttttacggcactaggtagaaacaatcagaccatattactgatcatatacaagaataacgatattacatgagatagcagtattttatcgtttcaatttttgaaaatcaacctttttagatattttcaaaataataaatttatattataaataaagaaaataaaggatgttcacaagtaattggattaaaaaggtataaaaagcccccgaaaaacagttccggttcattgtaaagacgggatgcagctgataaaatggatctgagggcaccgccttcaaaagacggcagaaaaggggtcattttcatgatcattcagttcattcgttacagataatgagaggtatagataaataggttaaacttccaattttgcgaggtttatttgtctatgcctttttcatttcatcggaataacgaatgaatgaggtgtttttattgacgtctataaaaagaaaacgcgcggaattactgcaatcatgccagtccgtattcaggtgtccgctatgcagttcggccatggcggtctcacaatacaaaagcttgatgtgcggacacgggcatacatttgatatatcaaagcaaggatatgtgaatttcctcaataaatcggtcaaaacccgctatgacaggcagctgttcgaagcgagacgcgctctttttgacagccgggaattttttgggccggttcaaaaggagatcgccgccatcatcagccgcattcaatctccgcaaacaacggcggcgatattggatgcgggatgcggagaaggcactcatttagccgccgtatgcaaattgcttcagcccgctttttccgtgacgggaatcggcattgatctctcgaaagaaggtgtgctgcatgccgcaaaggccttcggggatcatttggtttttgccgtcgctgatgtggcggatgcgccgtttgccgacagctgttttgatgtcgtgatgtctgttttatcaccttggaattacaaggaatgcagcaggcttttacgaaagggcggcacagtcattaaagcggtgccgcggcgtgattatttgaaggaagtaagggaattcttcttcggagacagtcctcggcggaatgacaccgccgattctgcggccggacgattccaagcgggctttcaaacctttgagcgcaaacggctgtgttacacgaagaccttatcgcagcctgaccttgagcggcttgtgaaaatgacgcccttaacatggaaatgtactgatgaaagcatccggcggtttatcagccgaaaagcggcggatattacgatagatatcgatattttaatcggaaccggtcctctgtaaacagaaaagacacgctgatcgcgtgtcttttttttatttccagacttcaccggcaatgttgacgacatgacgcagtttcgcccattgctgttcttctgtgatcaggtttccttcctcagtggaggcgaatccgcattgcgggctgaggcaaagctgatccaggctgacatattgtgaagcttcttcaatccggcgtttaatcgcgtccttgtcttcaagttcgccatgttttgatgtaatcaatccaagcacaagctgaagatcagagcgtttgacatagcggagcggttcaaagccgccggagcgggaatcatcatattccaggaacaatccgtcaaggtcaagcccgtcaaaaatcgtttcagccgctgcatcatagccgccttcagccgtccatgtggattggaagttgccgcggcagatatgcatcgtaaccttcagatcgtcagggcggtccttgatcgcgtcattaatggaagcggcaaacagcttgcgcagctcatccggcgttgtgccgaaatcttcaatctgacgaagccccgcttcagataagaaaacggcccatgcggtgtcatcaagctgaaggtagcggcacccggcgtcatagaaagcctgaatcgcttttttatacgcttttgacacatcgtgctgaaattgtttgtaatcattctggtaggccgctttttccaattttccgcggaaaaacagcatattcggacttgggatggtcattttcggaacagcatcgccggcaatgctgtgcaggaatttataatcttcgagcatcggatgctgagaaaaatcaatatctcccgttactttaatgccgcgcgctttcgtctgtacgttgtgaaactgaatgccgctttcaggcgtaaatgcctcaaccccgtctaaattttcgagaaaatcaaaatgccaccaggcacggcggaattcgccgtcagtcacgacattgaggccggtttctttctgcttttccacgctgcggatgatttctctgttttcgatttcgcgcagctgttctgccgaaatctcacccgccgctctttgcaggcgggcttgcttcacagccgccggccgcagcagacttccgacctgatccgcgcgaaacggcgggttttttcttagaagagtatgcaatggttgttctgtgttttgctgtgacatgaacgattccttctttcctgatgaaatgaaatataaaaaaactcttccctcggatagggaagagcttgcgtccgcaaatctcaaccttatcttcaggatttagcaccattctgctgaacagcggttgccgggtatcatagggccagtccctccacctctcttgataaggaaatatgctatttttcagaataaactgtaatactcttaatcttagtatgttttctcatattgtcaatatatttcgataaatatttttatttgtcaccctcaaatagaatcatatctatcacgatggcgatcgcaagacaaagagcaatatcctcttccttttcaatctgcaaatgataggaatcgccccagctcatccatgatttggtgacggtcatccggtttgattttccgtctgtcacttgaaaattccggccccacacatcgccggtaagattccagccgagtccggaaatttcaaatttcggtttgaaaaacgtgactttcttgatgacttggcagacgggtttgccgctgacggaaatctcgtaacggggaacgagcgacatcagtttctgattgacgctggcgagcgtgcggccgtccaaatcagtcagcttcagttcatcaccgaatgaaaacagctttccttcaacattgtagacttcttttccgctttcaagaaacacttgaaaacgattcttaaacgtaaacattcgctctttgatgtaaaaatggtacataaaaaaactccttttttatgttttacgaaaaaaggaggcggaaggtttcatatcggccgggtgcataaaaaaaggctgccgattttgcggcagctgtcgtttttatgatagcggcatccggcgtttttgacggatcgcatttaaatcaatgatgttattcgtgtcggcagctgtcaccagcgggcttgtctttggcgttttccggcggttgtccttactgaaagagaaaacaagataccctgtcaaagcagcgaaaataagtagcatcattttacatacctcccaaaaaaagttttggtattattattgtacgaaaaaacaaacgaaaagtattcaaacaattgtcacttttttaaaaaataacgtcattttccgtaaaaataactatgggttgaagaaattttgctcttgttgtggttctatagattgtatcggctgatgaatgatgatcgtttatataactttattactattttttgtaagtgtctaattaactacttcggtgttttcgtttgccttgtgttattcagtaccctaaaaaaccttatgatatgcaaaataactgcttctaacagatgactgcgagttgacagcgctttctttatttttttaaagaaaacgagatgttatcttaaaaaaatcgtttgaacattttccgcagttttttaaaagggtttgattttgtctccagtacacgcgggtcttttaaggtttttttcaattctttcgctacagtccctcttgccatagtcttcactccttctttccatttcataccttatatacggaaagaaagaaggaaaggtttcatgtgaaagaaaaaaaccaaagcagggggctttggttttaagcgcgctcttcaaagagcctggcgatttcaacaatgacgtttaccgccttttccatatgatcgacggaaatgtattcatattttccgtggaagttttggccgcccgtgaaaatgttcggtgtcggcagtcccatgtaagagagctgtgagccgtcggttccgccccggatcggttcgataatcggttcgatgtcgaggtttttcatggcttgatacgcgacatcgactatctctttgaccggttcgattttttctctcatgttgtaatattgatcacgcagttcaagcttgatgctttccttgccgtatttggccgccagcgcatcggcggttttctgcatatattcttttcgttctgcgaagcggtctctgtcaaaatctctgatgatgtacgacagggcggcttcagaaacgtctccgtccatggaaagtaaatgatagaagccttcatacccttccgtatattccggcgcttcttctttcggcagcgcgtgatgaaattccatcgcgatttttgaagcgttgaccattttgtttttcgccgttcccgggtggacgctttttccgtaacaagtaagctttgcggcggctgcgttaaagctttcatattgcagttcgccgagggggcctccgtctatcgtgtaggcgaacgcggcgttgaagcggccgacatcgaatttgtgagggcctctgccgatttcttcatcaggcgtgaacgcgacccggatcgttccgtgcttgatgtccggatgtttgatcaagtacgccattgccgtcatgatttcggcaatgcccgctttgttgtcggctccgagcagcgtcgtgccgtctgttgtaatcagcgtctggcctttatagcgggaaagttccgggaattgctcaggcgacaggacgacattgagtttgtcattcagaacgatatcatgcccgtcgtagctttcaataatctgaggattcacattttttccggtaaaatcggtcgcggtatccacgtgagccagaaaaccgacagtcggcacgtctttatccgtattcgccggcagagtcgccatgacgtacccgttgtcatcgactgtaatttctgtcatgccgatcgactttaattcatctgccagcatgttggccaatgtcagctggccgggggttgaagggcagttttcattgttttcgtcagactgtgtatcgacttttacgtaagaggtaaagcgttcaatgatttcatttttcataccgtcatctcctttgtcttatcttaccatgcgcgggggagggatttctatttcacaacccgtttgaatcgagggctctgttttttacgcgaatgaaaataaattatgaagaaacgatgactaaacgattaaactttttggaaatggatgattgaggaagaaaaaaccgatataatatggtcaattcattcaataggggaggctttcttcatggcgattttagtgacaggcggagcgggttatatcggaagccacacatgtgtcgagctgttaaacggcggctatgacatcgtggttctggataatctgtcaaacagttcaccggaagcattggagcgtgtgaaagacattaccggaaaagggcttgtgttttatgaagcggatctccttgaccgtgccgccgttcaccgggtgtttgctgaaaatgagattgaagccgtcattcattttgcgggattaaaagccgtcggtgagtctgtggctgttccgctccgttattatcataataatctgacgggaacgtttattttatgtgaagccatgcaggcacacggtgtgaaaaaaatcgtcttcagttcttcagcgacggtttacggcgttccggaaacaacgccgatcactgaggattttcctttaagcgccaccaatccttacgggcagacaaagctgatgctggaacagattttacgcgatctgcataatgcggactctgaatggagcattgcgctgctccgctactttaatccgttcggcgcgcacccgagcggccggatcggagaagacccgaacggcatcccgaataatttaatgccgtacgtcgcacaagtcgctgtgggcaagcttgagcgattgcaggtgttcggcaatgattatccgacaaaggacggcaccggcgtgcgggattacatccatgtcgttgaccttgccgagggccatgtcaaagcgctcgaaaaggtgctgaacacaacgggcgccgacgcctataatctcggcacaggaagaggctacagcgttctggagatggtcaaggcgtttgaaaaagtatcaggaaaagaagtgccgtaccgttttgccgaccggcgcccgggagacatcgccgcatgcttcgcagacccggcaaaagcgaaggctgaattaggctgggaagcaaagcgcgggcttgaagaaatgtgcgccgactcttggaagtggcagtcctccaatgtgaacgggtaccaaaaggtgtaaaaagaaagagaccttcaaatgatgagggtctcttttgttatgatgattatttaattttcacttcaacatcgttgctgaactttaatttccaagtgcctttagagtatgcgtttttatccacttcaaaagcttttacgtcagtcactttaatgttcgggttcaagtcacttaaaattttactgttgtctacttttgtttctgttgcatagcttgaagaagcatcaatatctgaatcataagatgttcctttagaatctactaatttcgctcttggaatggagaaagagcttaacggcttgtttgaaacatttttaaccgtgtattgaacagctacgataacgccgccgtcagacgcttttttctcgacaaattgagagcctactgaatctcttttttccactttcgtaacagtaacttcagttttctcagtcttaacagtgtcaccgatgttatacagtttttctttagattccgcagcttttgaagacgcagttttagatgacgaagaaccgcctccgccgccgatgtttacgagaatgataataaccaccactgccagaagcaatgtgatgattttatgtctcatgaaaaagtttctctgatctttaccgcagtttgggcattttttaacgcctttagcgatttctttgccgcatgccttacaagacaccaggttgcctgccataatatttcctcctatgtaaactatttcttaaaaactacatactataatgcctgtaaaataacctatagtcaataatattttgagaaaaaaagtattttaatgattttttagtcatgtattttaaggtcctttttagtatcggcagatcgttcgcattttccataggtttaatgaaaaaagagtggttgaacatgttcgtgatttcccgtataatcttgaaagataatataaaaactgaacataaaaaacagtggttttctagggttccgcaatgctgaattggtctggaccgagagaaaacacacagcaggttcctgctgtgacacgttgggataaaagcccgggagtttctgctcttttaatgaagagtgctctcccgggcttttttgattttataaaaaagggagtgtctgggatgaaaaagagattgctggatgtgctgatgctgattattggagcttttatctttgctttggccgttaatttattcgccattccgaatgatcttggagagggcggggtaacgggaatcaccctgatcttgtactatgtgtttgaatggtcgcccggggtgacgaatatcattttgaacgggattttattgattatcggatataaatttttagacggaaaaacaacgctttatacgatcattaccgttgtcgccaactcactgtttctgcatctgacgcatgattggcactcgccttcacatgaactcattattaatactatttttgcgggtgtgtttgccggtgtcggaatcgggatcattattcgagtcggtggcacgactgcgggttctgccattttggcgaggattgcgaacaaatatctcgattggaatatcagctatgcgcttttgttctttgatctgattgtcgtcttcagttcttatttcatcatcggtgcggaaaaaatgatgtttaccattgttatgctgtacatcggaacgaaggtgatggactttatcattgaaggcctgaatacgaaaaaagcggtgacaattatatctgagcataagcacgaaatcgctgaacaggtcaacacgctgatggacagaggggttacgctgctgtcgggtaaaggaaattacacggggcagtcgaaggaaattttatatatcgtcatccagaaacaagagctttccatgctcaaaaaaattattaaaagctgtgatacaaaagcgtttgtcattgttcatgatgtgcgtgatgtctttggtgaaggcttcgtcgatatctctaaataaaaaggatccctctgccggcgcggagggtttttttcttatgccggcagaagcggttatatccgtttcccgggaaatagcctgaaagctgtttcttaaaacgaagtggatacaatcggccggacgttttatactgaaaatatgatagagcgatagaaaggagcgcatatgaacccgttattggcaatttacccgagggctgtgttgtctgatacgtgctgtacggcggaggatgtcttttgcttttatgatgagaaaaggcgggtctatgtcgccattccgaaggaggatatcaccccgaaggagaaactgcttctggaatcatttttgacgcccgctgaagaaaaaggcgttttttttccggagacggcggcagcaaagaggtggcggcgttttctgctggaagaaggtccggtgcctgatgtcaaggagccgcgtgtccgttttatccattatgacttattgggagaacgggactggggggcattcacagaagcgctgcgccatttctggccggtttcatatacagttgtccggacggggagggatcatggcgtgattgtggaggaagaaaagctggaagcgccagattcggatgacatcgcatcttttgtgaagattctcgaaggcgatttttatttcagtgtccgttttttcgtcggaaggtattactgcaagggggaacgtctgcgccttcattatcagagagaacagcaatattgtcagatcggccggcgtcatctcccgcagctgagcacgctgaccgcggaaacggtatttccggccatgctcacggaggaaagcagagaaaagctctcagccttgcttcacgaagaagcggcgctgctgtttcagaaagaaccggagctgaagcatacgattcagacttttattgaacataactcaaacatgtcgctcacatcgaaaaaactgcatttgcaccgcaacagtcttcaatatcggattgataaatttgcggaacgctcaggtattgatattaagacatatcggggcgccctgctggcttatttcatttgtctgcaatatgaaaaatcacattaaatgggaaatgtgcacgaagacagcggtctttttttatgaacattgcctatatccgccgccgtctgacgctgttacaatcctatttaagaaagcgtttacaaataaagggggatatacatggcggaacttcggctcgagcatatttataagtattacgatcaaaaagaagcggctgtcgatgattttaaccttcatattaaagataaagagtttatcgtgtttgtcggtccgtcaggttgcggcaagtcgacaactttgcggatggtagccgggctggaagacattacgaagggcgatttctatatcggtgacacgagagtgaatgacatcgctcctaaagacagggatatcgccatggtgtttcaaaactatgcgttatatccgcacatgacggtctatgataatatcgcattcggtctgaagctgaggaagatgccgaaaccggagattaaaaaacgtgtcgaagaagcggcgaaaatgctggggctcacagagtatctgcaccgcaaaccgaaggcgctctccggcggacagcgtcagcgggttgcattagggcgggcgattgtcagggacgccaaagtgttcttaatggatgagccgctgtcaaatctggacgcaaagcttcgggtgcagatgcgggcagaaattattaagctccaccaaaggctgcaaacaaccacaatctatgtgacgcacgaccaaacagaagcactgacgatggcgacacgcatcgtagtcatgaaggacggaaaaattcagcagatcggcaccccgaaagaagtgtatgaacatcccgaaaacgtatttgtcggcgggttcatcggttctccggcgatgaactttttcaaaggaaagctgacggacggcgccattcagatcggttcagccgctctcagcgtgccggaagggaaaatgaaaatgctccgggaaaaagggtatgccggcaaagatatcatcttcggcatccgcccggaagacatacatgacgagctgattgtggtagaatcttataagaattcatccatcacagctaaaatcaatgtcgcggaattgcttgggtcagaaattatggtttattcccggatcggggatcaggattttatcgcccggattgacgcccgccatgacattcgtgccggtgaggaattgaccgtcgctttcgacatgaataaggctcacttttttgacagtgaaacagaaatcagaatccgctcataacgcaaagccggacagctggatgtccggtttttttgatgtaacaatttatgacgcataaccgatataaaaagtaaatagaagacagaaagcaggaaaacgatgaaacgcatgatcatgtgcatgtgccttttggctgccgtgtttacacttgccgcctgctcgggtcatgaggcaagcgccgaacaaagcattccgaaggcagaagcgcacagcgaaaaaaagtccgtaaagcggcaaatcaaaaaagagccggatacgtccgcctgggttcaaacgaaagggatggcgagactgccgattctgatgtatcacagcatttcagagggaaacagcctgcgtgtgccgaaggaagaattccggcagcatatgaagtggcttcatgatcacggctattatacgatgactcctgaagaggcctatctgatgctgacggaggataaggagccgcgtgaaaaatgtgttctggtcacatttgatgacggctatacagacaatgtgaaagcggcctatcccattttaaagaaatacaagatgaaagcgacaatctttatgatcggaaactttatcgggcataagaatcatctgactgagaagcagatgaaggagatggccgcccacggcatttccattcagagccatacgatgaaccatctcgaattgaacgggctcacaccgcagcagcagcgacgtgaaatgaaggactctaagcgtttatttgatcaaatgttcgggcagcggacgtctatgatcagctaccctgtcggacgatataataaagaaacattaaaagccgccgcctcgtcaggctaccgtatggcggtcacgacggagccgggagcggcgtctagagatcaggggctttacgggcttcaccgcgtccgtgtgtcgccgggcatgtccggcgcggcattcggctcttatattcaaaatgtgatgaaataacagagcctccgcatatgcggaggctttttttcagtttaatagaattgatgaagcagcagaagggtgacgctcacggtaatcgctccgccgattctggtcgacacttgggcgaacggcataagctcaagccgttcagcggcgctcaagatcgcgacgtcgccggtgccgccctggccggaatggcaggcattaataaccgccgtttcaatcgggtacagattcagccattttccggtcagaaaaccgacggccatcatcgtgacgacgattgataaaatggtaatgatgttgctgattgtaaacgccgcaatcagcttgtcccacggtgtcattgaaacgccgatcgcaaataagagcggataggtcacggctgtcgagaaaaagcgcgagacgccgaaggctccgttttcaatcgaagccggcgccagcctgaacagcttaatgagaacggcaaggacgagcatcacgactggagccggaagctgaaagaaatcatgcgccagcatgccgaccaaataaagggaaaccgctaaaataccgcccgaagcgaaaaaggacaaatcaaacgttttatcatcggccggctgttccaatgcgggagcggaatgatcagacttatcaaccttcccgttgcccgtccattccggtttgcgtttcccgatgacattcagcaaacccgataacataatggcgcacaggctgccgagcatgatggacggcagcacaagcgcaaaggcgtctccctgggacatcggcataatatcggagtagccgatggataaaggaatcgcgccttcaccgacaccccccgccataatcggaacgacgatataaagcagcgtgtgctgaaagccgagcccgagcagcgtcccgacgcataagccgacgatggcggccgcgatagacccggcgatcagcggaataaaaatcttaacgaaagctttgacgagcgtctctcttttcatcccgagaatactgccgacgacgataccggcaataaatagatagagaaagttggagctttccgtgaattctgttgttgaagtaataatgtctttcggaagcaggtggtagtagacgacagcggatggaataaaggttgcgagaatcgcagggccgccgatggaccgcacgatcggaatggattttccgatctggccgaaggtaaatccgaaaaaactcatgacggcaattgatgtcagaatgtcgctttttacatcacggctcatgacaaacaccgtaataagcaagaaaagcaggatatagataggaagaggaataatgccgattcttatattcattgctctggcaaaccagttatcagtccgttcctgtttttggattgaatccgtttgcaattttggttgaagttctcccatgcttgttcccccagtcgttatgtagtgaaaaaatatccccatttaaagtatactaaaaaatttaaattgttcatatattatgaatttactagaggacatgctttcttcacattttctttctcaaaatggcgatttggcgggctttttcaccgagaaaagcattttgttcgccacacgaataaaaaagaggtacgatatcaaagggacaaatatcctaggtgctgacataaaatctctacaaatccgacaataatcagtcacaatttcagcctgattttaggtatattgatctttttttttgggctgaatcgttgtaaagtaatgatattgaatcatttctatgacagccgctgtcccccagggtgtacaggctgatatttcaatagttttgacgaatttgtgaaacattgagcaaatatatcattttttgtgaaataccgagcaatgatttcactatgtttgtgaaatgttgagcaatttaccagattggaggaaaaacatcatgagtgagttggtattagcccgcattcaatttgcatctacaacattgtttcacttcttgtttgtgcctatgtctatcgggcttgtgtttatggttgctttgatggagacgctttatgttgtcaaaaaacaagagacctatctcaaaatggctaaattttgggggcatctctttttaattaactttgctgtcggcgtcgtcacagggattcttcaggaattccagttcggattgaactggtctgattattcccgttttgtcggggacgtatttggggctccgcttgcgattgaagcgcttttggcgttttttatggagtctatttttatcggattatggattttcggctgggaccgtttatctaaaaaagtgcatttgctttgcatttggcttgtatccttcggaacgattatgtcatctttctggattttgacggcaaactcattcatgcaggagccggtcggctttacgattaaaaacggccgcgcggaaatgaatgacttcggagcgcttttgacaaaccctcagctttgggttgaattccctcacgtcattttcggagcgcttgcgacgggtgctttctttatcgccggtgtcagcgcatttaaattattgaagaaaaaagaagtgcctttcttccataaatctttcaagctttcgatgattgtcggtctgatcgccggtatcggcgttgcgttcagcggacacatgcaggctgagcatttaatggaatcgcagccgatgaaaatggccgccagtgaagcgctttgggatgacagcggtgatcctgccgcgtggacggcttttgcgaatattgatacgaataaagaaaaaaacacatcagaaatttcaattccttacgcactgagctacttggcttaccagaagttcagcggcagtgtgaaagggatgaaaacacttcaaaaagaatatgaaaaaacgtacggaaaaggcgactatatcccgcctgttaaaacgacgttctggagtttccgcattatggcgggagcgggtgcgcttatgatttttgccgcgattgcaggctttattctgaaccgccgcaaaaagcttcatacgagcaagtggtatttacggggcatgatcgcactgatcgcattcccgttcattgcgaactctgccggatggattatgactgaaatcggccgccagccgtggacggttatggggcaaatgacaaccgcacaatccgtttcgcctaacgtaacgacgggatctctgctgttttcaattatcggtttcggcgtcatgtacttgattttaggcgcgctgcttgtcttcctattcgttcgtgaaattaaaaaaggtgcggaccatgatgatcacaaggatgttcctgtatcaacggatccgttcagtcaggaggtctaccatggggtcacttcatgatctttggtttgtactcgtttcagttttgtttgtcggatttttctttttagaaggttttgatttcggtgtcggcatttcgacccgatttcttggccataatgaattagaacgcagagtgctgattaacaccatcggcccgttctgggatgcgaatgaggtatggctgctgacaggtacgggagcgatcttcgcggcattcccgaactggtatgcgacgatgctgagcggatattatattccgtttatcatcatccttcttgctttaatgggccgcggggtggcgtttgaattccgcggaaaagtgaatcatttaaaatgggtcaaaacatgggactgggtgattttcttcggcagccttatcccgccgtttgtattcggccttatcttcacaagcttgttccgcggcatgccgattgacggccatatgaatatgcatgcgggtttctcagatattgtgaacgtgtattccgtccttggcggagcagccgtcacccttctttcattcctgcacggtttaatgtttgtcacactgcgcacgatcggtgatttacaagagcgtgcgagaaaaatggcaaaacgcgtaatcggtgttatctttcttgttgtacttgctttctttgcgatgtctgcatacgatacggatatgtttacacgccgggcaaacatcacgattccggtattcgtgctgattgtcatctgcaacgttcttgctgttgtgttcatgagcaagaaaaaagacggctgggcattcggtatgaccggcgcgggtcttgctttgacagttgcgatgatttttatctctctgttccctcgcgtcatggtcagctcgctgaaaagcgcgtatgacttaacagtagctaacgcgtcttccggtgattattcacttaaggtcatgacaattgttgcactgactctgctgccgtttgtcatcggcagtcagatctggagctattatgtcttccggaaacgcgtcagccataaggagcctatgacttattaatgggaaaagacctgtttctttataaaggaatgaagcggattcttgcgatcattacgggattaacgattatacaaacggccgccatcatcttgcaggcggaatggctgagccaggcggtaaccggattatttaacgggaagcggattgcttctctttatccggttatcggctttttcctgcttgcgtttttggtccggcatgcggtaaccgcggtccggcagaaaatcgtgtaccaatatgccgcgcaaaccggcgcagacttaagaaaaagatttcttgagcaattgttccgtctcggcccccgctttgcgaaaaaagaggggacgggccggatggtgacgctggcgatggaaggcatcagccagttccgccgttatttagagctgtttctgccgaaaatggtcagcatggcgattgtgccggcggccgttgttatttacgtgttttttcaggataaaacatcggctttgattctgattcttgcgcttccgattttgattgtatttatgatcctgctcggacttgtcgcacagaaaaaagccgatcgccaatggaagtcctatcagacgctttccaatcatttcgtggattcgctccgcggactggagacattgcggtttttagggttaagcaaatcacacagtaaaaacatctttcatgtcagtgagagataccgcaaggcgacgatgagcacgctccgggtcgcgtttttatcatcattcgccctggatttctttacgatgctgtcggtggcgacagtggctgtgtttctcggcctgcggctgatagacggacaaattctgctcggtccggcattgacagcgctgattctcgcgcctgaatattttctcccggtccgcgaagtgggaaatgattaccacgcgacgttaaacgggcaggaggcggggaaaaccattcaagcgattttggcgcagcccggttttaaagaagaaaagccgctcgaacttgatacgtggactgacggggatgaattacagcttacgcgtttgtccgtccgagaatcgatgtctgaatttcatctgtcctttaaagggaagaagaaaatcggaattatcggggaaagcggtgcgggaaaatcgacactcattgatgtgctgggcggctttttagagcctgcgtccggtgagatcaaggtaaacggtgaatcccgctcgcatctgcagtcagacggctggcagaagcagctgctttatatcccgcagcatccgtacatttttgatgacacgcttatgaataatatccggttttatcatcctgatgcttcccgtgaggaaacggcgcgcgctgctgattcagcgggtctttccggactgatccgcgatctgcccggcggccttgacggccggatcggcgagggcggacgggcgctcagcggagggcaggctcagcgtgtcgcgctggccagagcctttttaggaaaccggccgattctccttttggatgagccgaccgctcaccttgatattgaaacagaatatgaaataaaagaaacgatgaaagacctgtttgaaaacaaacttgtctttctggccactcaccgtcttcactggatgcttgagatggacgaaattatcgtgcttgatgacggcgcggtggcggaaatcggcacccacgacgaattgatggcgaaacaaggcgtatatgccaaacttgtaaaggcgcaactgggggaaagaacatgagaaaagaagaatggattctgccgtatataaagcaaaatgcccgtttgtttgttcttgtgatttttttaggcgcggtgacgattttttcggcggcctttctcatgttcacttccggttttttgatctctaagtcggcgacaaggcctgagaatatcctgctggtgtacgttccgattgtggccgtgcgcaccttcgggattgcccgttcagtctcacggtacgccgagcgcctgacggggcaccatatcattttgaaaatcgtgtccgatatgagggtgcggctttacaatatgctggagccggcctcgctcatgctttcatcccgttttcggacgggcgacatgctcggcattttggctgaggatattgagcatttgcaggatgcgtttttaaaaacgattttcccggcggtttccgctttgctgctgtatgcggcatccgttatcggactcggctttttttcctggccgtttgccgcttttgcggcgatttacctgtttatattggttgtattgtttccggttgtgtcgcttcttgtgacgagagcgaaaaacatgaggctgaaaagcggccggaatacgctctacagccggctgacagatgccgtgctcggcgtgagcgactggatgttctcgggacgacaggcggcctttatttcctcttatgaagagaaagagaaggcatggtttgaccttgaaagcaaacgtcagcggtttacgagatggcgtgatctcgccgcgcaatgccttgtcggcggcttcatattgatcatgctgttctggacggcgggtcagtatgcggacggcagcatcgccaacacgatgatcgcagcctttgtgcttgtcgtatttccattgacggaggcgtttctgcccctttcggatgcgctgacggaagtgccttcttatcaggattccatcaaaagaatgagtaaggcggctccggagctgcgaagtcgtgaggtgaagcagacagatgagatactggatgtatccgatgtgacacttacatttgataacgtgacgttttcttatgatcagcacagtcatgtgcttgaccgtttttccttcactctccgccagggggaaaaaatggcgctgctcggcaggagcggctccggtaagtcgacctctctcgctttaattgaaggcgccttagttcccgattcgggcaaggtgatgctgaacgggctggaaactgcggccgtgcaggagcagatttcctcagcggtggccgttttgaatcagaaacctcatctctttaacacgagcattatgaacaatatccggctcggaaacggcaaggcgagtgatgaagatgttaagcgtgcggctcggcaagtgaagctgcatgattatattgaatcactgcctgacggatatgaaacgtccgtgcaggagacggggattcgtttctcaggcggggaacggcagcggatcgcgcttgcccgtattctgctccaagacacgccggtcattatccttgatgaaccgacgatcggccttgatgcggtcactgaacgagaattgcttgatacgatttttgatgtctttaaagagaaaacgatcctctggattacacaccatttagcgggtgtggaaacagctgataaaatcgtctttttagaaaatggaaaagcagaaatggaaggaacccatcaagagctgcttgcagaaaacgaacggtaccggaagctttaccgtcttgatgttccgatcagaacataaacagccgcaaacgagcggctgtttttttgtgcggtttaaaatctcttcttgtttggaatataaataggagacagaagaggaggtacagagatgaatataatggattggacggaacaggatgtgaaagatacgctgccgaaacgggaggcggacagccataaaggcacgttcgggacggcgttattgctggccgggagcgatgacatgccgggagccgcccttctagccggattgggtgcgatgagaagcggtgtcggcaagctcgtcatcggtacatcggcaggcgtcattccgcttatcgtcccggtgctgccggaagccacgtactggcgggacgggtggataaaagccgcggcgggccagcccggggaaaccatccgggccgctgccatcgggccgggccttccccaaacagacgaggtgcagcaggcggctgatcagctgctttctggcgattatcccgtcatactggatgcgggcgccattacgaaaagaacctatccgaagaggaaagctcccgtgatcttgacgcctcatcccggcgaattttccagaatgacaggccttccgattcaagagattcagcagaacagagcggaatatgccgcggaatgggcggagcggcttcatgtcacgattgtcctgaaaggaaacgaaaccattatcgcttttcccgacggggaatgccgcaggaatacaaccggaaacggcgcgcttgcaaaaggcgggaccggcgacacgctgtcgggaatgattctcggcatgctgtgctgtcatcaagacccgaagcacgccgtattgaacgccgtccgccttcacggcgaatgtgcggaattatggacgaaagagcgctccgcccataccttattggcgcacgaactttctgaactgctgccgggtgtatggaaggaatatgaataaagaaaaggcgtcttcatagggaaggcgcctctttttgttttaaccttgatttcatcaggacataatacagcagcgacggaacggccaggccgatgacccaggcaatgtcgcctccgccgaatatttcagcgagcggcccgatgtaaaaggatgtattgatgaacgggatttctaatataatcgacaaaacgaaggcggccgctgtaatccaattgaccctgccgtattgtccgttgacgtcaaacatcgatttgacgtggtattttccgcggcggataaaatagtaatccacgaggttgatcgccgtccatggaattaagaaataactgatgaaaaagatgaaatttaaaaacagttccatgaaattgctttggcccaagagacttaatacagtacccgctgccgtcacacaaaggatcattaccactctcgttttcggcgtcaccttcagttttaaaaacggctccaaggtagtcgtggttgacataaaggctccgtataaattaaagacgttgatcgccatttgcccgaacaggacgatgatcagcataataaaggaaaacggaccgaacaatcggacaatctcatttcccgcattagcggtaaattccgggagcgccgtcgtcaaaatggcgccgagaagcatcatccagatggaactgactgacgtacctgcatagctgtaccaaaaagtatgcgatgccggtgttttgaccggcagataacgggaataatctgcgacatatggcgcgtatgccagctgccatgtggccaccgcgctgaccgccactagaaaaacaggcagatctaatgagccgggcacccagcttcctgaaggaatcggcagttgaaaaataagaatcgttgcagcaaaaaaaacggcaaaggaggtccaagagaggattttctgcattttgtgaatcagatcatgaccgtagatcgtgagtaaaaaacagatggcgcttaagccgataatacaccatgaagccggaatcgggacaaagctgctcagtgtaccggctgcgagaatcgtactgctcgcaaagaagcccaggtagataaacatgaccaaaaagaggggcagaatcgctccgatcacgccgaattgcgcgcggctttgaatcatttgcggaattccgagctgaggtccttgtgcggaatgagacgccataaagattgcgccgataaaggttccgatcacaatggcggcgatactccaaaagagatcgagtcccattgtaacgggcagtgtgcctgtgactaacgtcgtaatatgcatattagccccgaaccagacggggaataaatctttagcctttccgtgtctttcgtcatgcggaatatgttcaatcgttcgcctttctactttcaatagataatctcctccgtatgttcttctttaacataaagacatagcttaacagattgacctgccgtttacaaattccagcatgcaggaaaaacattgtaaagcctcgctgacagccgttcaaagttttttgaaaaacggaacaaacactgccgcctaaacgatttaccagggattaaaaggtatggatatgcttactgactaatatgtatgaaggagaaatgtgtcaatcttttgacgaatggagccattattcgttaagctgaaagaatagtttactttgtgtaaatttcattaatgaaaaggggattgatgatatgtgtacaagtcttacattgaaaacgacagacggcaatcacctattggcgcgaacgatggattttgcatttcagctcggtacggacgtcgtgctttaccctcgtcagtacagctggaaaagcgaagctgacggcaggatgcataagacgaaatacgcatttatcggcatggggagaaatctcggcaatgttctgtttgccgacggcgtaaatgaaaaagggctgtcgtgtgcgacgctgtattttccgggctttgcgggatacgagaaagcggaacgggagggcacctgtcacatcgctcctcatgagtttgtcacctgggccttatcaaactgtgaatctcttgaagacataaaggaaaagctctcaatgctgacgattgtagagaagaagttaatgttattggatacggtgctgcctcttcattggattttatcagaccgcacgggcggctgcattgtcatcgagccgacaccggagggaatgaaagtatatgacaacaaacccggagtgatgaccaacagtccggaatttccttggcatgtgaccaatctgcgccattatatcggaatcaggccgcagcagtcagaaagcaaaacattgggcggaatgacattaaccgctttcggccaaggatctggaacgatcgggcttcccggtgattacacgccgccatcccggttcatcagagccgcttatctgaaagagcatttagagcctgccgctcatgaaacggatggcgttacggccgcttttcacgtgctgtccaatgtgaatattccaaaaggcgcggtgatcacagaggagaatgaaattgattatacgcaatatacgtcggtcatgtgctgtgacaccgggaactactactttcatctgtacgacaaccggcagattcacaaagtaagtttattccatgaagatcttgaccgtccggagccgaaagtatttgcggccgcggcggagcagaatatacaggagctgaattagctcaaaaaaaaaacaggacgcgattgtcctgtttttttatttaatacggatcagacggatggctttcctgttcagcctgttttgcggcttgtgctgtatcagtagtgccgatcggcccgccgctgctgctttcggaggcttttttcagcccttccgcaacacgttttccgtagtccggatctgcttttgtgaaattctcaatcatttgatcctgaatgtctttccggcaggaagaaagcgtattgaccaggtttgtgatcaattcggtccgttcaaattccgaaaatctgcggtatgtttcaccggcctggccgaagttattcggccggtcgatcgcttcccgcttcacatcgccttcgacatgaggtgtatggtctttcccatcctgctttgcttcggtgagtcctcccataatggacggctcatagttgacgtgcgggttttgtccttctgcccgatcgacccgatactgcatttgcccgccttcctggttggtggcgacatgctttttcggcgagttgatcgggagctgcaggtaatttgcgccgacgcggtaccgctgggtatctgaataggcgaatgtccgtccctgaagtaatttgtcatctgaaaaatcaaggccgtccacaagcacgcccgttccgaatgatgcttgttccacctcggcatggtagttttccgggtttttgttcagaaccaatttgccgatcggcttccaagggaaatcgtctttataccacagcttggtcggatcaagcggatcaaaatccagctcgggatgctcgtcatcagtcatgatttgcgcatacacttcccattcagggtaatcgcctttttcaatcgcctcatacaaatcctgtgtcgcatggttaaagtttttcccctgaatctcttccgcttccttctgtgtcaggttgcgtatgccctgtttcggttcaaagtgatatttgacgagcacggcttttccttcttcattgacccatttgtaggcatggacgcctgagccctgcatctgccggtagttggccgggatgccccacggcgaaaacaagaaagtgatcatatgagtcgcttccggtgattgggaaatgaagtcgaaaatacgctcgccgtcctgaatgttcgtaacgggatcaggctgaaatgcgtgcacaagatccgggaacttcagcggatcacggataaaaaagattttcaggttgttgccgaccagatcccagttgccgtcttcggtataaagcttaacggcaaaaccccggggatcacgcaatgtttccggggaatgcttcccgtggttgacggtagagaaccgcacaaacgccggagttttcgttcctttcttttgaaacactttcgctcttgtatatttagaaatctcctcgtctccaaaacttccgtacgcctcaaagtatccgtgtgcgccggcgccgcgcgcgtgaacgacgcgctcgggaatccgttcgcggtcaaagtggctgattttctccaaaaaatcataattctccaatgtcgtcggtcctctattgccgactgtcctgacattctggttgtcagtgaccggatggccctgccggtttgtcagcgtgtcttctgactcgcctttaccggtcgtcttactggaaagcgtttcttcgctgtttttgttattttccattgttgaaccctcctttttgaacggtaacaatatgcccagcagagccgttttttaaaaccgattttcaaaagaagcggttattccgcgatcggcgtcaaggacccgccgttccatatttcgcccttgttcagcgtccagctgttttgataaaggctttgcgcgccttgattggccgccggacttaattgttcatcccatgtcaaaaagtacgcggtctgagggtatttttgcctgatcgcattaataaaagcagcataatcaaagcttccgatattgccggacggaccggtttcggcaaaggcaaacggttttttcagagacagcatttcatcatagcctgatatcgcatacggatcagtgaagtaagcgtccagaccggtaatatccacataagatgagcctgggtagaagtctgttttaaagtctctgttggcatccggcgaatacacccacaaaaggttatccaatcctcttgtctctgtcatatagcggtatatcttcttgtaaagctctttgtacagcgagattctctcattgtctttttggttgtagcctgtcagcccccaccagaaccactcgccgttcatttcatgcagcggtctgaacagaacggtgacgccttgatttttcagctgagtaaggccgtcggcaattttgctgagcagcgcctcaagccgttttccttccacagttgaagggtcaaggatgtttttgtactggctgtttgagatggccgttttatagtttccggatggaaaggccggatttgcgagatgcaggctgacctgagggaggccgccgcttttccagtatgagattaagctgctgttgcagctgtaatcgatagtatcggtgatatccgctgtttccagccaccctctcccatagtcacagccgtagatggcgggagactgtcccgtcgcgtttttcaagcggttttcctctgtcattgaaaaagtgacatcactgtacccgccgaacgctccggacatgaccctgttttctgaacggttgggcaggtgggccagccagttcatgatatcttttgtcgtctgctgggcatttgggttgacgggataaacggtgtgagccgatatcggactggcggctcctaagagtaataaaacgatagacaggcagactgctaactttttaagcatataaaagacctcctgatttttaagatgatgaaggatgtgaaacgataacctcacaatctccttctataacaaaatctccggaatccgccggcacgataaagtgatcgcctttctgaacggggcatccatccagttctccgcgccctttaatgacgcttgcgagtaaataccggccgggtgcggggaatgatgctttcccgctcacatcccattgataaactgaaaagaaaggtgtttcggcgagtatcgtaataagagcatctccgatccgatgcttagtgctttttacattttcatcggtatggggaatgtctgttacgtcaattgctttctcaagatgaagctcgcgtttattcccgttcccatccgtccggtcatagtcgtaaagccggtaggtggcatcagagctttgctggatttcaaggacgagcgtaccttcacataaagcgtgcagtgtgccgctcgggacatagaaaaagtcgccgggcttaatggggatgcggcggagcaggtgatcccactcgtttcgttcaatgagccgaacgaaatcttcttttgtttgggcgcggtgccctaaaatgagctccgcgtcttttttgcagtccaacacgtaccagcattccgtttttccgagttctccgttttcatgccgatgtgcatatgcgtcatccggatgaacctgcacggataagtccatatttgcgtcaagaatttttgtgagcaggggaaaagcttcttctttcggatgtccgaacaggtcagggtgttcattccagagacggtgtaatgatgttccggaaaatggcccgttccgcacgatggatgtaccgtgcggatgagctgaaatcgcccagcactctcccgtccgctcagaaggaatctcatacccgaatgtatcgcgcagcttcgtcccgccccataatctttctttaaaaaccggttccaaaaataagagtttcgtcattttcccgcctcccggtttgccgtctctaatgcgcgctccgccaatacgagcgaaccggccgcgccggagtgaatccctaattgagggggaccgatgaagtgttcaatgtcgggcagatcaatatattgattcagccgctttttcacgtgctgacggatataagagaacagctgatgctgcttcatgacgcccccgccgagaatgatcttttccggcgaaagtatgagaatatactgcacaagcgcttcggcaatataatagccttcaagctcccacacttcctgctgatccgccagcagatatgcttttttcccccagcgtttctcaatggcgggacctgccgcgaggccttccaggcaatctgtatggtaagggcaattgcctttgtagccgtcgtccgggtgtcttctgacataaatgtggcccatttcaggatgagacagcccttgaacaaatctgccgttcatgatggcgcccgctccgatgccagtgccgaccgtcaaatagaggcagctgtccgcgtttttggccgcgccgaaagaagcttctccgagcgccgccgcattaacgtcggtggtgaagcctgcgggaatatgcagtgcgcttttgatcgtttgaagaatagggcagttccgccaggctgtcttcggcgtcgcggtgatgcacccgtatgtttgactgtcggggcggatgtcaatcggtccgaacgacccgatgccgatggcttctatcgggaaatctttaaagtaacggatgacttgtctgagtgtgtcatccggttctcccgtcggaaactccgccctgtccagaatggtgccgtctttttgtccggcggcacagacaaatttcgtgccgccggcttcaatacctccaagcatggctgtacctcctcatctgttaaaatccgttttgatcggaaacggctttgaaccagcggccgctttttttgacggtccgttcgcccccgttttccagattgacagatacaaagccgtagcggtttttataagcatttgtccaagaccagttgtccataaaagtccacaggtgatagccttttacatttgaaccttctccgatggcccgatgcacccatttgagatgttcccggataaattcaatcctgtaatcatcctgaatgatgccgttttcatcgcggaagcgttcctcgccttcaactcccatgccgttctcggaaataaaacattcgatatttccgtaatgttctctgagattggtgagaatgtcatagattcctttttcgtatatttcccacccgcggtgtgggttcattttccgtccgggcataacatacggatcgaagaaacgctcaggcaggaaaggggcgtgcggattcggaacatgttcttttgccttgacgcgtctcggctggtagtagttcacgcctaagaggtcaaccgtatgctcctgaatgaggcggagatcttctttctcgtaacgcggcagaaagccttccgccttgagaatctcgacaagctcctcaggaaattcgccctttacggcgggatctaaaaatgagcggttgaaaaaggcgtcggcaatccgggatgctttcagatcttcagggtgtgagcttctcggataagaaggcgtcagattcagaatgattccgatttgtccgtcctgtttcaattctctgtaggctttgacagcccttgcattcgacagcagggtatggaagccggcctgcaccgcttcttgaaaattaacgtgattcggatagtgaaagtcgtataagtagccgccttcaatcggcacaatcggctcgttgtgagtgaaccattttttcactttgtcaccgaatagcgaaaagcatgttttggcgtaatgttcaaacgcgtcaacggtgtcccggctgacccagccccccttacgctgaagggcgagcggcatgtcaaagtgaaacaaattgacaaacggctcaatgcgatgggcaagcatttcatcgatgacgtcctgataaaacgcgaccgctttctgattgacctcgccagttccgtccggaatcaatcttgaccaggaaatagacagccggaaggagttgtggccgatttctttcatcagccggatatcctccttgtattgatcataaaaacgtgacgtgtcgccggggccgacgccgttaaaaaaacggctcggctctttttcataccagtaatcccatatgttttggctttttccgtctttgtcggcggcgccttctgtttgggtggcggaggcggaagacccccaccagaatccttccggaaaacgatattgaatatttgattcagtcaattgatttctctcccttactgcgattttgattacatactcatgctgtcatcccgtgcttgctgctcggcctcggcttctttttcctttgccatgtttaatttgtccagcgctttaagaaacgggaaccagataataaacacaatacagaggttgaccagctgcataatgccgcccatgacggaattggtcgccataatcccgttaatgaaaagggggacggtccagggcacggtcacgccagtaggagggggcacgatccccgccgacatggccaggtaggtgacgagcgtgacaaccatcggtgcgatcacccacggaatgataatgatcgggttcatcacgatcggcaaaccgaaaataaccggctcattgacgttgaaaatgcccggcgcgagaccgagtttggatatctgtttcatctgtttgcttttcataaaaagcaagatggtgatcactatggccaatgtcattccggttccgcccattccgacggtgtaaatctccataaacggcttagaaataatatggggaatctcttttcccgctgtatacgcagccaaattttcgacctgtaatgtattccagatcgggtccatcacggaattgataatgatctgtccgtgaagtccgaaaaaccataaaatctgaataaagaaaacagcgattaatgtaggaatgatgccgcttccaagtccgacaagcggggcttgaaccgtatgataaatgacatcatgcagattggtgtgaaagatctgggtgacagccgcattgatcaagaggaagacggtaagcgtgataaaagccggaatcaatgcggcgaacgatttagcaacagccggaggaacaccggcaggcatcttaatcgttaagtttctctggacgattcttctgtagatttcacccgacaaaaaagcggttatcatgccgagaaacatcccttttgctccaagccggtcaaccggaatgacgcctgcgaccgctttgcccgtttccggctctaagacgaacggggtgagcagcagaaaagaaaccaatgcaatcgctccgccgaatacggcctccacttcgtagctttttgaaaggtaatagccgatcccgaagacgacaaaaatggacataatccccatcgtcgccgtcgaagcgccgccaaatccggattgaaagacagacagggcggagctgctcatgattttgtttaaaaacggcaggttcgtcagcacgacgaacaccgaaccgaaaatggtcagcggaaacgccagcataaaagcatcccgtaagacttgcaggtagcggttattgtttaatttgcccgcgatcggaacaaggaattggctgattttctcaaacacgtcttcacccccggctttttataaattctttgattgaaataagtcgagcatttctttgacgatctctttcattgagagcgctgacattaagtggtcttcagcatgcataaaaagcagggagacatccgtcttggcgccgccggcttctttttgaatcatctgaaaatggatgtcgtgcgcttttcccagttcttcttcagcctttgtcagaaaggtgtctgactcatctggccggccgtctttataagcgcgtatcgattgaataatacagctgcgggcattgccgctgtgaagaatcagctgaaaactgatctgttcatccgtgtacgtttccatgcttatcgcctcctttatttgttctctatcaaggaaacggcctgttcgtatgcttttttgccgtctcccatgccgtatgccatcatatcaatcacatcaacggtgatgtgaagcgggtccgcctctttctgaagctcgccttttaaaaaactcatctgcgggccgatcagtacgacgtctgcgtctttcatcgcttcttttgctttatcctgtccgactgcccaaatctcggcctcctcaccgatggagctggcgtaattctgcattttcgtcacaagaaggctggtggacatgcctgagctgcaggctaataaaattcttttcatgaggaatcccttctttcataaagttaaaacgttttcatgaatattataatcttttgaaattaaatgtctatacttttaaaatataaaagttttacttttcggatttttgacacaaaaaaaccttttaagattcaacttaaaaggtttttcatctcaagcgagccataacagccataaataaagtccgatcagggtgatgaataacgtcggaatggttaatatcagacctgttttgaaatacattccccaggaaattttcacgtttttccggctcagcacgtggagccataacaatgtcgccagcgacccgatcggcgtgattttcggcccgaggtcagaaccgataacattcgcgtaaatcaatgcttctctcagcagcccgtgagtgtccgttccgttgatggctatggcgtcaatcatcaccgtcggcaggttattcataacggaggagaggatcgcagcgataaaacccattccgagtgtgcccgcaaacaatccgtgatccgccgctttctgaataagctgagaaagaagatccgtcagtccggcattccgcaagccgtacacgacaacatacatgccgacagaaaaaaacacgatggcccacggggcgtccttgatgacttgtttcgcagggacggcggggcttcgctgcgccagaatgagaaaaatgaccgcgatggagccggcaacgaaggaaacgggtatcgacagcagttcgctgacgaaatatccgatcaataaaacggccagcacagcccacgataaccggaaaaggcgttcatccttaatcgcggatgccggatgtttcacaagaccggtgtcataccgtttcggaatgttttttctgaaatagagatacagcaccaaaatgcttgccgccagagaaaaaaggttgggcaccagcatgcgtgttgcatattcaatgtacccgatatgaaagtaatcagcggatacaatattgaccaaattgcttacaacgagcggaagcgaggtggtgtcggcgatgaatcccccggcgataataaacggaaaaaccagcttttcaggtaaattcaaagcccgcaccatcgccagtacgatcggcgtcaaaatgagcgccgctccgtcattggcaaacagggcggagacaacagcccctaagaccgacacatagagaaacatccgcagcccgctgcctttggccgccatggccatatgcagcgcggcccactcaaaaaaaccgatactgtcaagaattaatgaaatgataataatggcgataaaggcgagtgtcgcattccagacgatccccgtcacttccgcgatatcgtgcaggctgactgctccggcgatcaaagcgaggaccgctccgccgcaggcagaccagccgattgatatatgtttcggctgccatatgacaaacacaagtgtcagcacaaaaatcagcgctgataaaaccgcaactcccaagaatatatcccccttaccggcatgtaacagtgacttctttttgccgcaatgtctgtaaaacttcgtccttttcatctatctgctgcagaatcgagcaaaccagcgcgtattccggtccggacggatgaatggcatagtaccgccactggccctcgcgtctttcgcgcacaaggccggcgttctttaatttccgtaagtgctggctgatgccgggctgacttatatgaaaaatagccgtcagctcgcagacacaatattccttatcctccagaagcttcagcatcaaaagcctcgtcgggtcgcttagaagtttgaggcactggctgatcccttcggaacttaaagcattatgccgccgttccatgcgctcactccttttttacactattatataagcagacatttatataagtaaacggcaatataaaaaaagccggtcttgcactttttgcaaaaccggctcatgtttatttttggaacagttttttcgcttcatccattgctaatttatttcccagtgccgaataatcaagccaaggctgatcggcaattttatagacatggtttgctttcacggccttaagccctttccagacagcgcttttttgcaattctttataggcttgctgtgacttgtcgtctctgttaacgaccacgaaaatcgcatctgcgttgtaatcaggcagcacttcttgagaaatgacttcataagggcgggaggtattcatttctttaatgccgtcagccggtttcagcttcagatcgtcaaacagaatcggtcccatcgggcggcgtgtgctgaagacgcgaagctcttttgcgttcacgcggatcgccatgactttggcgtttttccctaattccttattcatcatggatctgacttgttttgtttcatcttcgtaatcttgaataaatgttttcgcttctttttcacggttgacgatttttccgatgtcttttaaatgatcacgccatgtgcctttatcaaggtcgaaaacgtgtgtgtttccgattttcttgtatttagacacatcttttcccgcaaattctttatcaagataaatgttgtctggattcagctcaagtaaagcttccatatccgggtctgaggcaggtccgagttttttcgtgtctttcagctgatttttcacatgagggagaaaatcttttaattctccgcccacgacggaaccggcaggtgtaacgccgagagccagcagatcatttgtcaggtgaatggacatcgaagcgattttatgatcgccggatttcttttttgactccggctgtgatgaatcggattggcaggcagccagtaagaaaatacacatgaaactgatgagcgcaattatttttttcatgggaatactccttgttttatgatttgattttcatgacgagatagagaaaatacggcgcgccgatggctgccgcaaccacgccggccggaatggcgttcggctgaaacaaagaccggccgatggtgtctgccgcgacaagaatgacaaggccgattaatccagcaatcggaataatatgctgatgcatggtgccgacgagccgtcttgccaagtgaggggcggcaaagccgataaagccgattccgccggccatcgcgacgctcgcgcaggacaagccgaccgctatggcgatcagcatgatcctttttctctgcacgtgtgcgccgagccccgccgctgcctggtcaccgagcattaaaatattcaaagaccgggcgttaagccatgcaagcggtgcgagaatgccgatccagggcaaaagcgaccacacgtgaatccaatctctgccccagacgtttcccaccagccagcgggaagcgaaggtataagtttcttcattcaggcgcagcgacataaacaatgtaacggcgctgaagcccgcggaaacggcgatcccgaccaacagcatgcggatcgttaaaaaaccgttcagcctgtcgtacgtaagcactacgatcagcagggcggcgagtgttccgcccgcaaacgtaaacagcgggatgaacatcgacgcctgcgcctccagggaatgaaagaatgtgatatacatcatcaaaccgaaggaagcgccggcatgcagtccgagaatgcccggatcggcaagcggatttcgggatacaccctgcaaaatagcgcctgacacgcctaagccgataccggccagcatcgtcaccagtatccgggggagccggtaatcgaataaaacggttgtgctttgaaacgtgccgtaaccgaacagcgtttttcccacggtgaggggagaaagccggaatgagcccgtgtgcagcccgatcagaataatgcaaacggcgatgaccagcagaacgagacctgccgccgccgctttttttgtttctttctgcactttcatttataagtctctcccttccttgcgggcaatataaagaaagaaagggacaccgacaagtgccaccatgatgcctatcgccaattctctcgggggactgaccgtgcgtgaggccaagtcggccaaaatcaaaagaatcgcgccgagcaacgcggacatcggaataatcagcctgtacgtaacgccgacgatcttgcgggcgatatgaggaatgaccagcccgacaaagccgatcgcgccggcagcggaaacagacacaccggcaagaacgacggcgatcattaatcccgcggcacgcgtcagagccgtgttcacccctaaattcgccgccacgtcatttcccattgagagaagggtgacggaccggcccatgaatgtcgcgagaatgatgaagaccgcaatcacgggaacaaggacttgtaaatgagcccacttgatccccgacaccccgccggcgtaccagaaggccaaatcctggcttaaatcgtaataaatcgctacaccggtactgagtgaatgtaaaagcgcggccacgaccgccccggcaagcgtcacctttaaaggtgtcatgctgccttttcccgccgcactgataaagaaaatcaagccggtgcttgccagtgctcccaaaaatgacatcatcatcagcagggcgtatgacaaatgagggaaaaaagcaaagctgagcgcaacaacaaacatggcgcccgcgtttacgcctaagacacccgaatcggcaagcggatttctcgtgacaccctgcatgagggcgccggctgcggcaaaagcggctcctgtaacggccgcgccgagcactctcggaagacgcaattcatgaatgatctgctggcccgttatgttcggattgtaatcagcaacagccgaccaaaccgtatgtaaagtaatgtctttcgcgccgaatgagacggcgaaaaaaatagaaacaagcagcccgatcaccgcgatcaggaagaaaaccccgttttttaagatgctgatcagacggcttgcggacgtgacagaatcgctcaaaaatcaattcacctacttttatgatcattgtccggcatttattgaatatgagaatcattttcatttgaaccatcatattataccgggccgattttcaaaacgcaatagagtgttcaacaatgatgcccttttttctttcatgtttatattgtaaaaaagaagtgaaaaacgtgaaagaggaaatcgctatattcagaaaggagggaggcaaatggcgggagaaggaaagcctttgccgattgaattttaccagagaccgtcagtggagcttgcccctttattgctcggctgtctccttgtgaaggagacggatgagggaacggcttcaggttatatcgtggaaacggaagcttatatgggagcggatgaccgggcggcgcacagtttcggcaaccggcgcacgaaacggacggaaattatgttccatgaggcgggccgcatttatacatacgtcatgcacactcatacattaatgaacgtcgtcgcctcggacatcggcattccgcaggccgtgttaatcagggcggcggagcctcatgaaggacagttcctgatggagagcaggagaccgggcagacccccgagagagtggacaaacggcccgggaaaactgacgaaggcgatgggcatttcaatgaacgactacggcggcatgatcacggaaccgccgctgtatattacggagggctttacgcctgaacatatatcaacaggcccgagaatcgggattgacaacagcggagaagcccgggattatccgtggcgctattgggtgacggggaaccggtatgtctcacgctgaccatgtttataaacgctgataacaggggaaagacaaggtaaaagaaaggggattcagacattgaaaaaatttttcaaaacgattatcaaatgggcgcccgtcatctatccgattatcagaaaaatcataaaagaacggaaggcatctaagcggaaccgcatgtccgcatcccgaacagccggctgatccggctgtttttttacggtcttggcatcggattgccgcattgacttgaaatcctccccagtatagaatttacatacatttaccccttcctcattctttttgcccatttttcacatctgcatctgatctgataggaggtttttctcatgcttcatgggcggcttcgtgaacttctgcgcttgcttttagctgctgaaacaccggttacaagctcagtcatcgctgcaaatgtaaaggtaacgacgcggacggtccgcaatgacataaaggaactgcaaaccattgtagaaaaacacggcgcatccattcaatctgtcagagggagcggctataagctgctgatccggaatgagcagccgtttaaaaactggcttcaggacaatttccagcagaacagcaccgtaccgatttttcccgatgaacggatagattacctgatgaaaagaatgcttctggccgacggctacctcaagctggatgacttggcggaagaactgttcatcagtaaatccacacttcaatctgatttaaaagaagtcaaaaaacggctccgcccctatgacatcattttggaaacaaggccgaactacggctttaagctgcgcggcgaagagctccgcctccgttattgtatggcggaatacttagtggacgaccgcgagcccgagcctgatctcctgagtgaaaaggccggtattctgccgaaagacgacattcatgtgatccgcacagccattatgaagcaggttcgaaaccataagatcccgctttctttcttcggcctgaacaatctcatcatccatatcgccattgcctgcaaacgaatccggacagaaaactatgtatctctcattccggaagatcttcatgatattaagctcgaaacagaatatcagtcagcggaagccatcgtaaaagagcttgaatctgcgctttcggtcacctttcccgaacaggaaaccgcctatatcgccattcacctgctcgggacaaagcgcatgacccagtcacaaatggaaggaaaagagcttacaaggctgatagacggggaaaccagccgtttgacggaggccatgattgaagccattgagcgggagctgaagctcggaatcacggacgacaatgagctgaaagcgggtcttgcgctccatatcaagccggcgattaaccgaaaccggtacggaatgaacctgagaaacccgatgctctccgccataaaggagaattatccgctcgcatttgaagcgggagtgattgcgggaatcgtgatcaaggagcaaaccggcattgatattcatgaaaatgagatcgggtatttggcgcttcatttcggagccgctattgaaaggagaaagacggaacggccgcctaaacgctgtctgattgtctgtgcgtccggcgccggcagcgcgcagcttttaagagaaaagctccgttcccggttcgcaaaacgtcttgaaatcgtcggaacggctgattactgcagccttgaccagctttcctttgagtcgattgattttgtggtcagcacagtgccgatcaaaaaagacctgcccgttcccgtattgaaggttcatacgctgctgggcggcggggattttacaaaaatcgacgccatgctggaagaaaatcgggaacaattgaactttctgaaaccggagctggtatttttgcagcaggatctggagacgaaggaggacgtcatccgttttctcggacagcaggttgcagaagccggcctcgcttctgattctctgaccgattctatttttgaaagggaagcgatttctcctacgagtttcggcaatcttacggcgattccgcacccgctcgttccgcagacagacacgacgttttgggcggtatgcacgctgaagaagccgattgactgggcggataagcgtgtccaatttgtctgcctgctctgcgtcgagaaagaaagcaaagccgacctccagcatatgtacaaatggctcggcggcatgttggatgatccggccgcggtaagccgtctcttaaaatgcacaacctatcaggaggttttacgagtattcagagacaaacgatcagagaaagaccgggatacaccttttttccgttagcagcggaaaaagcctgagtagttatgaaagcgatttcataatatgatgttactaacatcgagacatacaaaatatcaaactttcaggaggtcttttacatgaatatattactcgtttgtgcagcagggatgtcaacaagcttactcgtcaccaagatggaaaaaagcgcgcaggaacaaggaaaagaatataaaatctgggcggtgtcaggcgattcagtcaaccagcatattgataaagcggacgtattgctgcttgggcctcaagtccgttatttgcttccgcagctgaaaaaattgggtgaatcaaaaggagtgccggttgaagtcatcaataccgtccattacggcacttgcaacggagcggaggttctgaaatcagcggaacagctcggaaacgcatcgtagaaaggggcgggccgtgtgaataaggtgaaccagtttttagaagagaaagtcatgcccattgccggaaaaattgcctcccagcggcatctgcaagcactgcgtgacggaatcatcctcaccatgccgcttatcatcatcggttcattttttctgatcatcggcaacctgccgattccgggatatgcggatttcatggcgaagacgttcggaagcgcctggtctcaaaaactgcaatatccggttgatgcgacctttgaaatcatgggccttgtcgccgctttcggaatcgcctaccgcctggctgaaaaatacggggtggacgcattatcggccggtgcgatatctttggcggcgtttctcttggcaacgccgtacaaagttccgtttctgccttccggcgcaaaagaggaaatcatggtgggcggcggcatcccgctgtctctcatgggaagcaaagggctgtttgtcgcgatgatcatcgccatgctgtcgacggaaatttaccgcctgatcatccagcggaatttcgtcttcaaaatgccggacggcgtgcctccggcggtcagcaaatcatttgtcgctttaattcccggctttgccgtcatctttctgatctggggtgcgcgtttaattgtcgaagcgacgccgtttgaaagccttcataacattgtaagcgttgtactggggacgccgctctcgattcttgggggaagtctcggcggaagcctggtagccgaagcggttcaaatgcttttgtgggcgtgcggattacatggggcgaacattgtcggcggcgtcatggcgccgatctggttcggagcgatggatgccaaccgtgttgcgtttcaggcaggcgatgcgctgccgaatattttcacccagcagttctttgaaatctggatcaacatcggcggaagcggcgcgacactggcgctcgtggtcaccatgtttctccgttcgcgaagcaagcagatgaagcagcttgggaaactcgccatcgggccggctgtctttaatattaatgagccgattattttcggaatgccgatcgtcatgaacccgatgcttctcattccgttcatcatcacaccgcttgtcacactggtctttacctatatcggcatgagcacaggcctcgtcgccaaacctgccggcattgccgtcccatggacgatgccgccgattttctccggctatcttgccacgggcggaaaaatatcaggggctgtcatgcaggcgattaatatcatcacagcctttatcgtgtactatccgttcttcagaatgtgggattcgcaaaagctgaaagaagaaaacgaacttgaacaatcgcaggcgccagccgtacagggagacgaaaaagccgtgctgtagagaaagggagtgaaacacatgaatgaaaaaatggaacagaccatttttcagatcatcctgcatggcggcaacggcagaagcgcatcaatggaagccattgccgccgcaaagcagggggacagagccatggccgaggaaaagcttcaggaagccgcaagggaactgaccgaagcccatcattaccagacagaattgatccaaaatgaagccggcggagaaaaaacagacatgacgcttttaatggtgcatgcgcaggatcatttaatgaatgccatgaccgtgaaagacttggccgctgagttagtcgagatttacgaaaaagtgagtctgcaagggggagcaaaaatatgacaaaaagaattaaaattgtaacgatcggcggaggttcaagctatacaccggagcttgtggaaggcatcattaagcgctatgaggaactgcctgtcagagaattatggctcgtcgacattcccgaaggcgagaaaaaactcaatatcgtcggcacgcttgcaaaacgcatggtcgaaaaagcgggtgttccgatagagattcacctgacgcttgaccggagagaagccttgaaggatgcggatttcgtaacgactcaattccgcgtcggtctccttgaggcccgcgccaaagacgaacggattccgttaaaatacggcgtaatcggccaggagacaaacggtccgggcggtttattcaaagggctgcgcaccatcccggttattctggaaatcgcgaaagacatcgaagagctttgtccgaatgcgtggcttgtgaatttcacaaaccctgccggcatggttaccgaggccttgctccgctactcgaatctcacaaaagtcgtcggcctctgcaatgtgccgatcggcattaaaatgggcgtcgcaaaagcattggatgtggatgtcagccggatcgaagtgcaatttgccggactgaatcacatggtcttcgggttagatgttttcttagacggcgtcagcgtgaaggatcaagtcatcgaagcgatgggagacccggaaaacgccatgacgatgaaaaacatttccggagcggaatgggagcctgaattcctgaaggcgctcgatctgattccttgcggctaccaccgctattatttcaaaacgaaagaaatgctcgagcatgaaatagaagcttcacagacggagggcacacgcgccgaggtcgtgcagaaggttgagaaagaactgttcgaactgtacaaagatccgaatctcgccatcaaaccgccgcagctggaaaaacggggcggagcgtactacagtgacgcggcctgcaacctgatcagctccatctataacgacaaacatgatatccagcccgtcaatacgataaacaacggcgcgatcgccagcattccgaatgactcagcggtcgaagtgaactgcgtcatgacgaaagacggtccgaaaccgatcgccgtcggtgatctgccggtgtctgtccgcggactcgtccagcaaatcaaatcatttgagcgcgtcgccgctgaagcagccgtcacgggagattatcaaacggcgcttcttgcgatgacgatcaaccctcttgtcccgtcagactccgtggcaaaggccattctggatgaaatgcttgaggcccacaaagaacatctgccccatttctttaagtcgattgaagcataagagcagtaaaaaaacccggattcgcttccgggttttttgcttattttgattcgcttagtgaggcgactttcgccgtccagccgaacacgtcggcttccgcgcctttttgaatgcctgtaatggtatcatacaatttcttcgagatctctccggtttcaccgctgccgatgacaagactttcatcattccagatcagttcgccgaccggagaaatgaccgccgccgtaccggttccgaatgtttcttccaatcggccgtcacgatgcgcctggatgatttcatcgatcgaaatcttccgctcagacacagtcagtccccaatgtttgagaagggtgatgacggaatttctcgtaatcccttcaagaatgcttccgttcagctccggcgtcacgatttcgccgctgattttgaagaagatgttcatgctgccgacttcttcgatgtatttcttctcaatgccgtcaagccataaaacctgggaaaatcccttctcttccgcaacctgctgcgctttcaggcttgatgcgtagttgccggcggttttcgcgtttccggtgccgcctttgacggcgcgcacgaattcgttttccacggcgatttttaccggtttaatgccttctttgtaataagagccgaccggggaaaggatgataaacagcttgtacgtatgggatgccgctacaccgaggaaaggctcggtcgcaataataaacggacggatataaagggaagtgccttccgctttcggaatccagtcttggtcgatggctacgagctgtttcaggccttcaagaacaagctcttcatcaatgagcgggatgcaaaggcggtcatttgactggttcaggcgctccatatttttctccggtctgaacagaagcacttcctgatccttcgttacatacgctttaagcccttcaaaaacggtttggccgtaatgataaaccatggccgcaggatccattgagatggactgataagggataattctcggatcataccatccttgatcggcgtcgtaatccataacaaacatatggtcggtgaaaattctgccgaacgcaaggttatgggggtccggtttcggttttttggctgaagtcaattcaacacgaatgtcttgtttcataatgttctgtctccctattggtgttattgtcaaacttatttgaaaataatttatattctattgtataccttcaacaaatattcgcaatagttttcctcaaatttgtgaaaaaatcaaatcacataaaaagcaggggagagaatgccccctgcgtgttcgtttttacatattctgtaatcatcgtgctcagtgaaccgtcaccttgccggttttgtaaaactgctccattgctttatcgacgtacacccagcccttccaggcgatatggatggtgtctttcataaagtacggatcatattcgtgcccggataagtcggcaacctgaaagcccttcgctttaatttgcttagtgacttttttgtagtaatcagtccggccttttttcgggaagccggtgtagtcataccattttccgttgaccggaataactacgaacatcggttcagcgccggcatctttcagaatgtccagcatatcctcaaagtcgtgatattcgactgatttggcgtacgttcttcctttgttgattcctttcactctctttactttcttcttaatctttttataagaagcgtcatcgatatagaaaggattggacttggagctccgttctcctaattgagcggcggctgtttttaactctgaccacgatttccctttcaggttttcagagatcgtccgttcagggcccttggtttctcccattgaataataaagatcttttttctcaagcagagaataataagctttggcagccggcatgaccgctttcactttccatgattgtccgttgaccattcccttgtataattcagaaaggacggcatcatgctgaacaactttaaaacggagcatgcgcttcatcatgttctttttgaccgcgggatcaatctggttattaaatgctaaatccaatgcctgaagtgatgaaaaattcggcgcaaagtgctgttcatcagaaccttttttgataaaccattgcggagaaacaatgaataccagctttttgcccttcagctgctgataatgcgccgcaaagttcacggcgtgtatcaaggattggtccccgccttttccgacaagataaggcgtaaagccttggttgttcacttggaaatagttggacgggtgaaactcatccagtcttgaaagctcggaagaaccgaaaatcggcatatacttcgagtcttcgaacattttgttttgcagatagaggccctggaacatattcggatttaaggccgctgccgactcttcgacacgtttttcaggaatgaagcgcgtaagccatgaagccggaactgcgatagctccgacaaacaggacaaacgctaaaataattggtccaaagaaacgctttttcatttacttcaactcagtcagtttgtttacaatgttgtttggcgtattccactcgtcacggtcaaattcagtgatcggcactgtaatgccgaagcggttttcgatggcgacaagcagttctacagttccgaaagaatcaagcagtccttcttcaaagatttcaatatcaggattttctttcacagcgtcctcctgacaaacttcagctaatacgtctaatacttcctgtttaaattccatgtgttttcaatctcctttagtgatgaaatggttttcctgagaaaatataaaatccgaaacatacgaaatggaatgtgatgacgatggctaaaaaggccgtaaaacgattggcgggcagccacttgtatttcttattccatttctcaaaaaagttatacccggtcattaatacggcgtggtaaaggccgtatataatatattgcagggcgagtccgtgccagacgcccatcagcatgaacagcaggaaatacccgatgttcgagacggccatccggttctttatccattttttctttgtcatccagaatacaaagcgcataaatacgtagtctctgaaccagaaggataaggacatgtgccagcggttccagaagtctttaatgtttttgctgataaacggcttattaaagttttccggagatttgatacccatgatatagcttacaccgacggcaaacatcgtgtaacccgcaaaatcaaaaaacaggtacaagctgtatccgtacatgtacagcacattaccccacagtttactgtgggtgatatgaggcagattcataatgaaatacgtgttaatcgcatatccgataatgaatttgtacaagaaaccgataaaaattttatgaatgccggtatacagtaaatcagcgtattctccctttgtccatactttctgttcgtccttggcaaatctgcggtatctgtcgatcggaccggaagaaatggtcgggaaaaacataataaagtacaaaaggcggtgaagcggcattttttctttaatcagtccgtctctcgtttccatgatcagctggacgcctttaaatgtcaaataagaaattcctaagaaactgatcaggttatgaaccggatgatgaggcgccggcgggaagaaaaacggccataatttagataaaaacaggggtaaaatggacgcgatcacggccatactgaagacaaagccgctgttggctttcagtctgtaagcgagataacccctgattaaaagcacctgccacagcgtaaagatacatagtgcgatcacgccgtgcagatcatgcgcgaaaatcaaagccaatacgatgatggatataaacatgttgtatccttggaatctcttgccgttcagccctaaaataatcgtcggcaaaagaaggattccaagtaagataaagaagaaaaacgagctgtaaggcgtcatacaagaacctcttcgccaatgcgtttacggtcgatttttccgttcgcagtcatttgaatgtgatcctgataaatgaattttctcggaatcatgtaggccggaagcgaagcggccagttcttttttaatggcgcttgtcagctggaattctttttcaaaatcatgtttttcaggcacgatggcggcaattaaatattcgactggtccgttaggctgatacgggatgacaaccgccgtctgcacatattgagactgccttacatgtacttcgatttcctccagctccatgcggtagccgtgaagcttaatctggaaatcaaggcgtccttggcagaaaatctgaccatcctgaacataaccggcatcacccgtgtgatatgcccactggccgtcaattgagaaaaacgctttttccgtcagagacggttcaccgagatagcctttgctcacgctcggcccggcgatgatgatttcccctttttctccgtccggaagcttattcccgttttcatccatgatgaagatattcatatcgggttttgcaaaaccgacgggcagagattcattttcatcgataatctgctgcgtaatttcaacggaggtgacggcaaccgttgtttcagtcgggccgtatgtattgaatacgcgggccttcggaaaacggtttaacagttcctgtgccacggcagccggaagcgcttctccgcaaaacataaatacttctgcctcaggcaggagctcctgcgtaaagccggggtccatcagacacatttggacgaaagacggcgtcgatgtccagacgttcagtttggatttctccagctcttcaaatagtactttcggtttattgattttgtctttcgttacgcagtgcagcgtacctcccgtttgaagcgacgggaaaatgtccatgacagataaatcaaaagaaaacggagcttggtttaagaatgtcttacccccgcccacaggaaaatccctgcagatccagtcagtgaagctttgcaggttatcagccgatatctgcacgcccttcggatttcccgtgctgccggacgtgtaaataatgtaaaacgtatccagctcttttacccagttctcacggctgaggtctgcatctccgtcagctgcaagctcttcgggcgtaacggttttaatcagattgcttcccgtatcgactgcatcgcccgatacgctgataagcagctctgcgcctgagctttcaatgattttgacgatccgctccgccggaatggaaacatcgacagggatgtaagggcggcccgctttgacgcttcccaagaaagaaacaatcatattcggctccatatgtccgtaaaccaggacaggcgctttcgaaccgtcagctgtatgtttttgaatgccggacgcaacccgctccgacaaatcccataattccccgtaagtgagggaatgatctaaggaacgaaacgcttcggcctgcggcttggcgtctgcgtatgtttttatagcatcaagtagtttcatagttatcctccccgattagaaatcgttgtaaatataagtgccggtattcgctgtatgaaatccatacatccaaaagagcaatactaatatcagaaaataaaagcccgtatgaaacgtccatttgatcaatgtattttcataagcacgttttaatttttgcatcatattcaaaattccttccccgcgtattcaataattacaccagtatatgacgattagattaacaaaaagtttcaaaatatgtctaatatcctaagcttaaaatttccttaaaaatgaatgagaaacaaaaggatggaaaacacgcatgtataaattggcaaatgatcatactaaaaaggcgctgttcaggcgggatttttaacttatcgtaaatataaacgaggtaaaaaaattttggcggctttttcttaagcaggcttgtgccgaaccccaagggagaagggcgaaaagccgtttccggcaggatagctgataaagcgccgcatcttgtgaaatgaggaagaaattattatgatagataaggtagcagaaaacgtgaaaaccccaattcaacactactgttatcggctgactgtgaaagccttttaatagaaaggaagaggaaaatgaatcaaaacaatatggggggcagccaaaagacgcccgagaaagaaagcatgggccgcattttgtggcagctaacccgccctcatacattgacggcatcgtttgtgcccgtacttctcggcaccgtattggcgatgttttacgtaaaggttgatttcctgctgtttttggccatgctgttttcctgcctttggatccagatcgccacgaacttattcaatgaatattacgattttaaacgcggtttagatacggaggattccgtcggtatcggcggagcgatcgtccgccacggcatgaagccgaaaacaattctgcagctggcgctcggctcttatgcgattgctctcgtgctcggtgtttatatctgcatgagcagcagctggtggcttgcggctatcggccttgccggcatgctgatcggctatctgtatacgggcggcccgctgccgattgcgtatacaccgttcggggaactgttctccggcatttgcatgggctctgtatttgtccttatttcttttttcattcagacaggcagaattaatgaacagagcattttgatttccatcccgatcgccatcctggtcggagcgattaacctgtccaacaatattcgtgatattgaggaagataaaaaaggcggacgtaaaacgctggccattttgatggggcatagaggggccgttatgatactggcggcatcttttgccatcgcttacatctggatcgtcggtcttgtcatcatgggttacacaagcccgtggctgttcctggtctttttgagcgtgccgaaacccgttcaggccgtgaaaggctttgtgaaaaacgaaatgccgatgaacatgattattgcgatgaaatcaacggcgcaaaccaatacattcttcggattcctgctttcaatcggactcctgatcagttatttccgctgatcaaatgaaagggcaaatgctataaccggcatttgcttttttttatgacataatcttcacgatattgtaaagaacctgaccgcggactgacccgtctcatatatggacagcaaagcaaggagatgaaaaaaatggacttgtcaacagcccatatggatgatttaaaaacggtcatggaagattggaaaaatgaattattagtttataaattcgctttagatgagctggatacgaagttttctatcatcagccaggaatataatctgattcacgggcataacccgatcgagcatacaaaatcacgcgtgaaaagttttgaaagcatcgtcaataaactgatgcgcaaaggctgcgatgtgacgacgcaggaaatgaaagagcatattcatgatatcgcgggtgtcaggattatctgttcctttatttccgatatttataatgtcgctgaggttctgaagcagcataaggacctgaagatcgtaaaggtgaaggattatatcaaacatccgaagccgaacggctaccgcagcctgcatttgattattgaaattcccgtttatttgacgaatcgtgtggaatatgtgaaggcggaaattcaaatccgcaccatcgccatggatttttgggcgagccttgaacacaaaatttattacaaattaaataacgaagtcccaaagcatctgaccgacgagctgaaggaagcggcggacatcgcccattatttagacgaaaagatgcttgggattaagaaagaagtcgattaaacgattgacccgtcacaaccagccggaccgctattatacgcagtccggctggttgtttatccgtttatgcgcagctgtacaaattttcgcctgcccacctgaatcgtcatgccgtcttctgcggtaatgacggtatgaagggcatccgttttctccccgttcactttgattccgccgttttgaatcatacggcgtgcttcgctttttgaagaaaagagtccaagcgtgacaagcagctcaataaggggcacggtcttttctccgtcccatatgacggttttcatatcttcaggcaggctgttttgctggaagacacgtttgaaatgccgctctgccgcatccgccgctttcgtgccgtggtacattctgacgattgtacccgctaagatcattttggcatctctcggatgaagctttcctgattccaaatccttctccatctgttttttctccgcaggctctaagtctgtcgctaaatggatatatgttttcatcaggctgtccggcaatgacatcgttttgccgtacatgtcgttcggatgctcgtcaatgccgatatagttgttttttgatttagacattttttcaacgccgtcaagaccttccaaaagcggcatgaggatgacgacctgcttttcttttttgtagcgttcttggaaatggcggcccatcagcacgttaaaatgctggtccgtaccgccgagttcgatatcgctttcgagaacgacagaatcgtaaccctgcatcagcgggtaaaagaattcgtgaagtgagatcggtttttgcatggcgatgcgctcctcaaagtcgtcgcgctccatcaggcgggcgacagtaattttccccgctaattcaatcacatcttccagattcaatgtcttcagccattttgagttgcagtgaagttcaactttgtcttgatccagcaccttgccaaactgttcaaaataggttttggcattgtgttggacttcttcatcagtcagctgttttctggcttgcgacttccccgtcggatcaccgatttttccggtaaagtccccgataacaagctgtatgatatggccgttttcttgaaattggcgcagtttgtttaacacgacggtatggcccaagtggacgtcgggtgcggacggatcaaggccgagtttaatgttcagcggcttgccggatgccactgatttggcgattttatttctcaattcttcaggcggtatgacgtccgcggcgccggtcatgtacaaatccagctgcctttgcacttctttttcctgatcattcgttaaagtgattgattccatcttttacatcctcctttttttagccaaacaaaaaagccgcatcccaaaaagggacgtggctgtatgcacgcggtaccaccctgattgaagacgaaacgacgtcttccgctcattcgaataacggtttcccgttctttgctactgaagttcacaaagaaagctcagggaggtaattcacgtttgtctttgtgccggcttgcaccatccgccggctctctgaaacagggagacaatccgttactgattcccgtcatagctgctatgttatgaaattgtcagcgattttttgcagcagggcggacagcgttttttgttcctgtttatccagacaggccgtcagttcaatttccccctgatgaaagtcggggtacagatcttcaataacctttctgccctcatcggtaatactgacgaatacaagcctgcggtctcttttgttcgtttgtctgctgcataagcccttcttttccaaagtgttcaggacattgctcgccgtcgccgaggtaattccggatagagcggctatccttcttgtatcaagcgtttcccattcacaaaggtcatacaggatggaaaacgccgtccatgataatttgtgtgccgacagcacctctttctccatttttacacggagctgctgggcggaccgatagagtgcagctgcaatataggccgcctctttgtttcggccggatagatcggaaaaaggcctgttcggcttcttattgtctgatccggcatcgttgcgaatcgtcaatggcgtcatgctccttattattgtcagaatcattagctatgaaatgaattttaacagagaatgcgaaagatatcaaatcgcaaacagcacattcccgcagaaaaaatgtgtaagattgaggtttactttttaaaaaaagggaaagacatttgtacaacaaaaagggagatgaatatcagtgggaaagaatgaaacaatgcatatcgtatcatgtgccgatgataattatgctcgtcatttgggtgggatgttcgcttctttattgatgaatatggataaaacaaggaatgccaaattatatgtgatcgacggcggaattactgccgaaaacaaggacaagcttgaacagactgcgatgtcattcgggacgccgcttgaatttttagaagtagacgctgatcaatacaagcatgcagtcgaaagcagccatattacaaaagcggcttattaccgcatttctatccctgatttaattaaggatgagtccgtaaagcggatgatttacatcgattgcgatgcaattgtgatggaagatatttcggttttatgggacttggatatttccccggcaatagttgcggcggtagaagatgccggacagcatgaaagactgaaaaaaatgaatatcagcgacactgccaagtattttaattccggtattatgattatagatttcgaaccttggagaaaacagaatatttccaaaaaagtgattgattttatcaatgataacagctcggaggattttctcgtgtttcatgatcaggacgcgcttaacgcgatcttatatgatcaatggcatgaactgcatccgcgctggaacgcgcagacgcatattatcatgaatgagaaaacgcctcctgaactgatcgaccgtatacgttacagagaaacacgtgccgaaccggccatcgtccatttctgcggcggggacaagccttggaatacaggcacctcgcacccgtatcgtgatcattatttccgatatatgtcctttacgaaatggaacacgattgaccgcccggccatgaaccaataggcaggtgtgatgaaaacgcttgtgaagccgttgaccggctcacaagcgttttttttattatttcacccgaatcgcacgcacgcgtttttgcaggctggtcttttcggcagacggcttcaatcggctgactgccgtttgcgccgctgattttgcttttttcgtcttggttttttccgccgtttttactttgtcccttgcctgctgccggttgagtttatcttttatccagccaagccgtttttccagaacggttttttcttttcccggctggatttcgctgactgctttttgggcttttgcggtgttggcctcagaagtctttttttccgcctgcttgacgctggcctcagcagttctcaaaaggcttgagttgacagcgttcagccgcttttgcagcccttttttctctgaaccggccggtaatttgcggatggcgctttgtgcggcattgacggcggtttttttcttttgtttttcggcagtccggactttgtctcttgcgtccgtcacatttcttgccgtctgaactttattgatccgcgcctcgagagcggtttttccttttgacttggacagtttgctgactgccgtttttgcttcatcgatatctgcctgctttttcgtcttttccgcttttattacggcccgttcggcaaagctcttttgttttgtgtgatattgcgccagtccgtagccgaatcggctgtcacgtccgggagcgcccagatctttgacgttctgctgcatctgctgccggagctgtgtatttgtttcctccggatatttctgcctgagcagcgcgaacatgccggtgacgtgcggcgcggcttgagatgtgccgtcagctgtggcgtacatttgattcagatacgtgctcgtaatattagtgccgggtgcggcaaactcaatttgttttccggtcgtggaaaaagctgcgagcccgtttttttcagttgacgctgagactgccgttacgctgctgtaggcgcccggataattgacgggttttttattgccgtcgtttcctgcggcggcaacgatcacgattccttttttgtaagctttgtcaacggcgtcgtgaagacttttgctgtctgcgtttgtcccgaggctcatattgatgatgtccattttattggcgatcgaccagtcgatcgctttaagaaggcttttgagatctcccgctccttttctgtctaatgctttaaccgcatataaccggacatccggcgcgatgccgtcgatgccgtatccgtcatgtttggccgcaatgattccggcgacatgcgtcccgtgtccgttgtcatctttgtatgagggagtatagctgactgcggaatagcctccggcaatggagagatcatcatgagggtaaatgccgctgtcaatgacagccactttcaccttttttcccgtcaagccttctttccacgcctgcttaacctgagtcggttcgatatcccattgcggcagcacgtaactgctgctttgggcagctgataacgggcggatatcagaaccgcctgctgcctgaaaggatacattctcttctacatataagatgtcagggtcctgtttcaggtctttcactgtttgcgaatcggctgacacggcgactgccgggagatgctgataggtctgttccacatccgctccgctgtctatggcggattccttgccgttttgatttttgtacaccacgataacgtcccggtcatgcgtctcggcgtgcgcgggcgccgcggcggagaacaggctgatgcacaaggccgcggccattatcggtttcagggtgtgatacattgcgattccccctttttctttatatatcggcagtgcggaattctttttttcctgaggggtaaggaaaatttctgtatgcaaatgtaagcgtttccaaaatatgatggagaaaatgctttaagacatctgcgcaatgaactcaaaaagggggtttttgataaatgagtacgttcaatcgggtcatggaagaaaaaatcatgcctgtcgccggaaaagtcgccggccaaaggcacttaagagctttgcgggacggcattattttgactatgccgcttatcatcatcggatcggtttttctgattctgacgagtcttccgattcccggttatgccgattttatggctggtcttttcggtgaaaattgggttgaaaagctcgggtatcccgtgaatgcgtcctttgacattatggcgcttgtcgccgcctttgggattgcttaccggcttgcggaaagctatgaggtggatgccctgtcgtcgggagccattgcccttgccgcctttttattggcgacgccgtatcagattccgtttatccctgacggctcgtcaacagagattatggtgggaggcggcataccgatttcgctgctcggaagcaaaggtctgtttgtcgcgatgatcattgcaatgctgtctacggaagtgtaccggtttattatacaaagaaatatcgtcattaagatgcctgacggagtgccgcctgcggtcagcaaatcgttcgttgcgctcatccccggtttcattattattacgcttgtatggctggcccgtctgtttattgaaataactccttttaaaagtctccacaatgtcgtaggcgatctgctgggcaccccgctgtctattttgggcgggagtctcggcggaagtcttatcgccgaattcgtgcaaatgctgctttggtcgtgcggcatacacggcgcgtccataatcggcggcgtcatgtcgccgatctggtacggggcgatggacgccaaccgtttggcttttcaggcgggagaagcgctgccgagcatttttacgacacagttctttcaaatatggattaatgtcggcggaagcggagcgacgcttgcccttgtgctgaccatgcttgtgcgctccagaagcaaacagatgaaacagctcggccgtctcggcatcgggcccgcgatttttaacattaacgaaccgattattttcgggatgccgctcgtcatgaatccgctgttaatcgtgccttttattgttgcgccgctcttgaccattacggcgacgtacatcgggatgagcacggggatggtggcaaaaccggcgggaatcgccgtgccgtggacgatgccgccgctgatttccggttatttggcgacgggcggaaaaatctccggttcggtcatgcagctgatcaatctcctgattacatttatcatttattatccgtttttccgaatttgggatcttcaaaaatggagagaggaacgggcggcggaacaaaacgtcacagaagaaacataaaaaaaaacgggcgctttcgcccgtttttttaacgctggaaaaattcgatccattcgccgtcaggtccttcaatgtaaaagtagcggtacccgttcggaagtgtcgtgatttcttcatcaatgaatacggcgccctgacgcttcgcatgcgtgaactccgctgcgatatcttcagtcaataaagcgacatggtgcacttttccttctgcgggaagctcgctgctgtagccctggatcagctcaatttctgtctccggcccttcttgaaagccgagaaaggcaagttcaataatgccgttcgtatgagtgatacgatcctttaactgcataccgagaacgtcttggtaaaaggcgatggatgtttcaatatctttgaccataatgcctgtatggtcgattcttttggctgtcatggttttccccctgttttgaatttttcgggacaatgcggtgttgatcatgttttatggtacgataagagaaagcaaaacgaaagaggaatgcacaatgaagctacttacagtgaaagatacatttgccggaaagctgaaaaaaggattccccctgattgaaaaagacgctctgtccggaagctcggctcatttaacagagggcgatctttttgatgtgacatccgagaagggtgagtttatcggaaaaggctattacggtttgcagaataaaggagtcggctgggtgctgtcccgcgcgagagatgaacggatcgacggacgtttctttctggacaagctgaaaaaagcggctgaagcaagagcccatctgtttaacgcgcccgatacgacggcgttccggcttttcaacggtgagggcgacggcatcggcggcgtcacgattgacttttatgacggttatctgctgattcaatggtacagtaaaggcatttacgcttataaggacagcatgattgaggcgattgacggactggagctttcttataaagcgatctatgaaaagaaacgattcgatactgccgggcaatacgtggaagacgacgattttgtcaaaggcgaaagaggagattttccggtcattgttcaagaaaacggcatacggtacgcggcggatttaaacgatggggcgatgacgggcattttcttagaccagcgtcatgtacgcaaagcgattcgggacaagtatgcaaacggcagacgggtgctgaatacgttctcttatacgggggcattttccgttgcggcggcgcttggcggagctgagaaaacgacaagcgtcgatgtcgccaaccgcagtctcgcaaaaacgattgaacagttcagcgccaacggaattgattatgaggcgcatgacattaaggtcatggatgttttcaaatacttcggctatgcggagaaaaaagggctggcgtttgacctcatcatccttgatccgccttctttcgcccgcacaaaaaaacggacgttcagcgcggcgaaagattataaaaacctgctgaaggaaacgatcgccatcaccgcaaaaaacggcatcatcgtcgcttcgacaaacagcagcgccttcaatatgaagaaatttaaaggttttatagagaccgcctttaaagaaacaaatgagcgttacgacattttggaagaatacacgcttccggaagatttcaaaacgattccggcgtttaaagaagggaactatttgaaggttgttttcttgcggaaaaaataggatgatcatttatagcgtggaaagagggggaaaagaaaaccctcttccatcgctttaatacgggataaataatcttcatatcttactgtttaaagaaaaaacccgctattatttagtatctcatctgtgccaagtaaagtggcctcactaatccctccgcccaattgtatcctcgataatgattttaatgggcaccaccctttttttgagtatctatataaattgtaatggcatcactcatgagcttcgccaacccttcaccataccggtcgatgttcttagtgaagcgttcatcttcaatatagagttgacctaatccgtaaaaggcatcaaaagaatattcaccaaaattttcattgagaaaatcaaaccactctttgatagctgtttgtacgtctggggactcgggagattggttaataaggagtgcaaatttattgaacattgcagtccacttatcagataaatctttttgctcaccatcagtcatgtttttcaatctaatatttaccttatcgacaggttgatcaccccaccgtttgcgggcttcttgctcataaagattatcattaaagttaattccctcaaaccgctctttgttcgtcatgcaaatctctcccatcatatgtttgattgatttatcgatggtttcaatcatcttattgactctattccgtttctcaatcaacattttcttttgtaaaatgaatgcttcccttcggttaaatgaaggattagtaatgatttctttaatctcttttaaggagaaatcgagctccttgaaaaatagtatctgctgcagctgttcaagattctcttcagaataaagccgataaccggaatcggtcgtttcctgaggagtcaataatccaatttgatcgtaatgatggagagtgcgtatgcttactccaatcaggtcagctacttcttttactttcatacccattacgtttgccgcctccttaatggctactctaaagtattacgcaacgtaagagtcaatagttggttaaaaattttttgtatataaagggagaacatatgaggatttcattgctgaaattaaagaaaaaaaagccgggcgtgaagctccggcttttttctattcaataatgtgctgcacccggccgattcgcccgtcttcaaggcggaccttaatgccgcgcgggtggaagcttgagttcgtcaaaatatccttcacgattcctcttgtcagctttcctgaacgctgatcggctttcaggacgatatcgacttcaagtccttttctgatgctgcttcgctgctggccgttcatatgacacatccgttcttcagtcttttcacttcatgtcttatcatatcgtgttttcgtctttttatgaaggacagacaaatcaattcttcatggcaactaaaaaaagaccgctctgtaaggagcagtcttttatgacataaacgaaagcaaaatcggggccgcgcacagtgtcataatcgcggcgagaatcatggacacgcttgagatcgttcctgatacggagctgagctcaaatgctttagatgttcccgctccgtgcgcgctagttccgagcagcacgccccgggcaatttcgttatcaatgcggaaatagcggatgaccatcggcccgatgatcgttcccaataaagccgttaaaatgacgaaaaccgctgtaacggccggcatcccgccgatcatttctgaaacgttcatggcaatcggcgtcgtcacggatcgcggcacgagactgtcgactaagctgctgccgagattgaaccattttgcgataaaggctgttgacagaatggcgatacatgaaccgaccgctacgttcaaaataatttccacggcgtatttctttaaaatcgggaaatatttataaagcgggatggcgaacgccactgttgccggctgaagcatatcggtcagcagtccgccgccgagattgtatgtctgatacgggacattgacaagaagcagcagtacgaccaaaacagcgggcgtaatcagaagcggcgacgtatacacccgcggaaaacgaatgtagagttttttcgcgcccaaatatactaagacagttaagaataaacttatgattccgatgaacacgtttgttttttctcctttctttttgctatcagctgtgtaagcgtacctgttgaaaccatcacgacaaatgtgctgatgacgacgacaagtaaaatgcttacgccgaatttagacataatatctccgtattcaatcactccgacggcagacgggatgaaaaacagcagcagctcaccgaggagccatgctgcgccaagctcaatccattcaagtttgataatcttgaaatgcaataatgtgaaaagaatcacaatcccgattatactgccgggaatatttatatgaagagccgccgtgatccaattgatcagacgcgcaaatataaacagcagagcgatttgaataacggtaagcagcaattttttcataatgatgcctcccttatatttatattgtacagaaggttttgctataggtaaaatacatataaagaataatgtgtattccttttgtctatagaaaggatgaaatgtaatggatatccggcacttaacgtatttcttggaagtggcccgtttgaaaagctttacgaaggcttcacagtctctgtatgtttcacagccgacaatctcaaaaatgattaaaaacctggagacggagctcggcattaaactgttttaccgcaatggccggcaagttgaactgactgacgccggacagagcatgtatgtgcaggcgcaggaaatcacaaagtcattccaaaacctgacgtcagagctgaacgatattatggaagtgaagaaagggcacgtccgcatcggtcttccgccgatgatcgggtccggctttttcccgagagtgctcggtgacttccgcgtcacataccccgatgtgacgtttcagcttgttgaggacggctctattaaagtgcagcaaggggtggaggacggctcgcttgatatcggggtcgtcgtgcttcccgcgaatgaagagatttttcataccttcacaatcgtcaaggaaacccttatgcttgtcgtccatccgtcacatcggctcgctgacgagaaagaatgcagtcttcatgaattgaaagaagagccgttcatatttttcagggaggattttgtccttcataatcgaattatgacggaatgcgtgaaagccggattcaggccgcatgtcatttatgaaacatcacagtgggactttatcagcgaaatggtatccgccaatctcggtatcggcctgctgccggaaagaatctgtcgcggtcttgatcctgacaaagtcagaaccattccgctcgttcatccggtcattccgtggcatttagccatcatttggcggaaggaccgctatatgtcctttgccgccagagcctggctggagcatacgaaatcgtatttatggaatccgaaaaagagaaaaaaggatgattaagcatggacgcacaaaccgcagctcaacacttgagtaaagtgcgggatcaaaacccgctcgttcacagtatcaccaataatgtcgtcacgaacttcaccgctaacggactgctcgcgctcggcgcatcgcccgttatggcttatgcaattgaggaggccgccgacatggcgaaaatcgccggagcgctcgtcctgaacataggcaccctcagctcggcatcggttgaagctatgatcgcagccggaaaatcggccaatgaaaacggtgttccggtcatttttgatccggtaggcgccggcgccacgccgtttcggacggcatcagcccgcaagatcatacaggaggtccgcttgtccgttattcgcggaaatgccgcggaaattgccaatattgccggcgcccctgattggaagataaaaggcgtggatgcgggggaagccggaggagatgtggttcagctcgctaagacggctgcaagcgggctgaagacggtcattgcgattaccggaaaaaccgacgtcatctccgacggcaccgacacatacgccgtacaaaacggtgataaactgctgacgaaggtgacgggggcgggatgcctgctgacgtctgtaatcggagccttctgcgcagcggggcaggacgttctgcaagcggccgtttcagccgtttctgtatacggaagcgccgctcagcttgccgctttggacacctcccataaggggccgggcagcttccagattgagcttttaaacaagctggcaagcatctcagaacaagaagcggctgagcttgccgcaattgaaagggtgatagaaaaatgacgcgtatttctcgggaaatgatgaagaatatgttatcggtttattttattatgggatcaaacaatacaagcgcagacccggtttccgtggtgaaaaaagcaattgagggcggcgctacgctttttcaatttcgggaaaaggggagcggttctttaacaggggatgaacgtgtcctgttcgcgaagcgggtgcaggatgtctgcaggcaggccgggattcctttcatcattaatgatgatgccgaattggccttgcgccttgaggcggacggagtgcatatcggacaggatgacgcagacgccgaagaaacgagagcggcaatcggcgatatgattctcggtgtgtcagcacataacgtctccgaggtgaagcgggcggaagaagccggagccgattacgtcggaatgggcccggtctatccgaccgaaacaaaaaaagatgctgaagccgtgcagggagttacattgattgaagaggtacggcgtcagggcatcaccattccgattgtaggaatcggcggcattacggctgacaacgcggcgcccgtcattgaagcgggtgcagacggcgtcagcatgatcagtgccatcagccaagccgaagatccaaaagcggcggcgcggaagttttcagaggaaattcggcgctccaaagcagggctgtcccgatagggcggccctttttctgtgtgcgcaaaaaggcgtgacggactgggagaatagaagccgtatgtcaagaacagagcaatcaagcttgcaatatcgaccgaagcgtttgacggctctatcgcttctctcaaagtgacgcctgaaccaatcagcgcaggctcaaaagccctctataaaacagtgaatagcgcgaagtgagagaccatttcgaggtcacggaaaaacttaatgcggaattcagcgaatttgaagttttgatgtcgaaatacaaaacgtgcgatcaatgtatacgtcttgtgatacattaagtacagatcaaatcagagagataagcacgaagctgacggccctttctgaaaccatgtcgaagattgccgatgtgctttaaaaggagttaagacacagcatgagcgatgaacataacaaggaaaaacagatccacagacgggatgtcctgaagtggggcgccgtcgcgggcgcagccgtcgctgtcggagcgagcggcctcggaggactcgcgccgctcttcaaaccggcggccaccgcttcaaagaagaatgatgaaaaacgtgatcgtgatcaaatcgttcctttttacggaaagcaccaagcaggaatcacaacggcgcatcagacgtatgtgtattttgcggcgcttgatgtcatgtcaagcgacaaagccgatgtcatctcccttttcaaacaatggacaagcttgacgcagctgctgacttcaggcgccgtcccgtcaggcgaacagaaaaataaatatatgcctccgcaggataccggggagtcgcaggatctggcaccggcgaatttgaccgttaccttcggcttcggccccgggtttttcgagaaagacgggaaggaccgcttcggactgaaagataaaaaaccgaagcacctcgccgatattccgccgatgcctaacgacaagctcgataagaaacaaggcggcggtgatatcgtcatacaggtctgcgcggataatgaacaaacggcgtttcacgcggtgcgcaacctgatgaaacaggcatcgggtgtgtgtgaagtccgctttctcaataaaggtttcttaagcggcggaaaaaacggagaaacaccgcgcaacctcttcggattcaaagacggcaccggcaaccaaagcacgaaggatgaaaacctgatgaattcgatcgtttgggttcaatcaggagagccggactggatgacgggcggcacgtacatggcgtttaggaaaattaagatgtttttagatatatgggaccgttcatccttgaaggaacaagaggacacgttcgggcgggtgaaaagctcgggcgcgcctttcggacaaaaaaaggaaaccgatcccgtgaagctgaatcaaattcccgccgactcgcatgtcagcgtggcaaaatcaaccggcagacagattctgcgccgggcattttcctatacggacggaattgatccgaagacgggctatgttgacgcaggcctgttgtttatctgctttcaaaaagacccggaccgccaatttgtcccgatgctgaaggctttggcggcaaaggatgcgctgaatgaatacacacaaacgatcggctcttccttattcgcctgtcccggcggctgtaaaaaaggagaatatatcgcccaaaggctgctggaatcgtgacaccttccatatggagggtgttttttttaaaaaaaacacttgtaactataaaagttacaacttaaaatgataaggaaaggagacttacaatgacactgcagattaaagtatattctgattatgtatgtccgttttgctatgtcggcaaagcggcgtttgaagaagcaatcaaggacaaggacgtacaggtggaatggatgccgtttgaattgcgtccgagcccctcgccgaaacttgatccggtgaatgatcccgccaagcggcagatgtggaaaaactccattgagccgatggcgcagtcgttaggcgttgaaatcacgttcccccgcgtgtcaccgcatccatacacggatttggcatttgaaggctttcatttcgcaaaggaacacgggaaaggaagcgaataccatacacgcgtttttcaggcgttctttcaggaagaacaaaatatcggtgacgttggcgtgctgacaaagcttgcggaagaagccggacttgacggcgctgccttcaaagaggcgcttgagacaagagcgtacaaggacgtacagcgggaagcgctccgccatgcttatgaggaagccggcattacggcagtgccgacgtttatcatcggcgatgagagaatccctggcgcggcgggaaaggaaacctttgaacaaatcattgagcgggaactgaataaacgttaacccgaaaaaagccctctcgatcagcgagagggctttgccatatagtgtttgacaaatgtttgtctgtccgcttcatatgccgcggcgtcaaaggagtcgccgcaaaaatgaaggcaccaagggtctttctggcaggcgacgccgacttgatagccgtgtttttgaaattcgagcgactgtgatgtgtcgtaaaaatgaaagccgcgaaacaaatcctcccgccactccacgtcatattgagccgccattaacaagccgtcaatggcgtcagcgggcgtaaacaggccgtcttcatcaccgtgctcaaaatccagcgggtgataagcattcccccggtattcaatcacttttcccatccgctgtccgctttcccaccaaatgccgttcggcggcagggttttgcagccggcgacaccgagaaggccgagctcctgatgagattgaaagatatgaagcatgtcatgaaggaaatgctgatgaatgataaaagtatcctgatgcagataaattttatatttggaggggtgtttcagcgctttgttgtaggacgaggccatgcttgctgaatcgtatatcggcatgatatcaacggagtatgaaggggggacggtaagctgcatgatatggctcttgcaccgggagtacagcgactcatcattcacacagacgacaaacagaaatgaatgtgaatccattacatgctcctctcggcctcaatcacatattgataggccgatgcttctgtcataaagtcatgccttatgccaagctgtacgcatacttcgtgcaatgatgcgatggctttgtggtaagaagggtgatcaacgcggatcgcctcaatgcgtttgacctcatagctggcggctttaaataatgaaagagtctcttcccgggtaaaaaaacgcaggtgggtctgatccattaatccggcgtcactgtaagtccatttgccggctaaaagctccaacacgactgagatgtggccgacattcggtatgcatgcaagcacagtgccgtctttttttacataaggacgaagctttttcagcactgtccacgggtcgacaagatgctcaagaacgtctccgaacagcatgcagtcgaattgctctgattcgtacggaagaatggcggattcaatgtcgccgcaaagcacgtggctcaatttgctttccgccttttttgcggcttcgggatacgcttcaatgccgtaaaccgttattccgcggtcttcgatcgccgctcctaaattgcccgtgccgcagccgacatcaagcactgtccgccagttttcgtctattttgttcaataaataaggattcaggccttcgtagtagttctgttgtttttcatcataatagggattcgtatccatctgtgtatcacctcataaatgggcataatacacaagatatgcagcggggggatctcatatcaccatgtttggctgttcaattgcggaatgcggacgggaatggttgtccggtatacggtttgttctctgattcccctcttattgcgggtgttcctttgaaaactcgggtgcgggcggactgtggcaggtcatatagtaaaaggatccgcctgtaatcttaccgctggcggatggtgtttttcattggtgtttttttcttcaccgctttttcagtatttaagaagcgcctcacatcgtcaatgtgcaaacccatgattctagcctcttgaattaacaattgccaatcttgatctatatctttcattacatgagttttcataagaacctccaattgaaaaattgatttgcccagctacagcagccaatgtataacaaatatcacacatagttggccggtaatcccaaattgaagatgaattcacctacctattccctaagaaaatgactgaaataaccaaaatccttcaagaattcttacatataataataaacaaataaatactgactggatagtatgcaaataaaaataaaccatatgacctattaacatttaccctcaaaacgtcgattagcatattctttttgcataaaaaataccgcaaaagaatgattcggtgtaagataaagtgaatgatcaaacagctggggtaaaaaatgaaaaaaaacaaatttcaaattaagagagaagaaacatttgaaagttttattgacgcaggccttcatctcctgattgaaagagcttacgattcagtctcaatcgatgacatcagtaaagcggcgggtttcagcaaaggggcgttttacgttcattttgaaagcaaggaagattttctgaagcatttgttagagaggcgtcagattaaaaaaaggatcatcactggctatctcgacgaattagaaaagcaaacagagcggccgttgacgctttgtgaagccgcggccagcgcggccagcctgttgatgcggtttgtaaacagcaagcctgcctggaatgttgtgtcttttgccgttcatatgcctacttacaaagtcgtcagtgaatatgaagcttatatccgcctgtataagttatggatagaagaaagcaccatgtacataaattggctcaaatcgagaaatttaatagaagaccatatagataccgagcataccgctaacatgatgtgcgcgctcatcgacggggtgattaagcaatccaatgtgctgggaaggccggttactttccgcagcatgtttgacgcgctctatgtttttgtcagcaccagaaaatcagggtaacgttcttcttgatttgacaaaaggtttagaaaagtctttcagaaagcgaggaactgccatgcgctacagagaaattatgatgtatatcattatggggatattcacgaccatcgtgaatatcgtcagtttttacattctgacgtcggcatttgagatggattacaaggcggcgactgtcgccgcttggattctgtccgttctatttgcttatgttacgaataaacggtatgtctttcagcaaaagaccgcggggatgcggagtctgatgaaagaattaacggcctttttcagcgtgcgggtactgtctctcgccatcgatctcgccatgatgattcttctggtcagtcaatttcatatgaacgaaacattggcgaaaatcgccgataacgtcattattgtagtcgtcaactatgcggccagcaagtggattgtcttcagaaaagcgaaagaagagggcgtgtcataaccgtttctttccgcgtcccggggggaaagtgtaatggtggaaggggatgcgtttgaagcgcaaaataaagaaagcgtttgctgatgtattcggggaatccgagacctgcgctttttctttgcgcccggcagagtgaatctcatcggagagctaacgggggccgctatgaggagaagacagagagaaaagctgacttttacacggcggatatcggcgccggagcgagagaactaaagggggatgacgatggcaattgagcggcacgtggaacgtttaatccagtacggattgcaaaaagagctgatttcatttcttgatattgaatatacaagaaaccgtttatatgaaactttgcatattacccatccggaggcttcagaacagaaagaaaatgaatcggcggcatcattgccggacatattggccccgatttatgaatgggcggcagaaacgggccggattgcagccgatacagacacctatcgcgacctgctgagcgcgaagatcatgggctgctttgccccgcagccgtccgagattgtgcgtcgttttgaagaaacaaaggcggtgcacgggccggagcaggcgacaaaggcgttttaccgattttcagaggatgtgtattatatccgttcggacagaatacagcggaatgtcggatggacggctgagacggcttacggaaagctggacatcacgatcaacctttcaaaaccggaaaaagatccgaaagcaattgccgctgccaaagagcagcctcaatccgattatccgggatgtgttctttgtaaagaaaatgtcgggtacgaggggagaccggatcacccggcgcgtcaaaaccttcgtgtcattccggtcattctcggcgatgagcagtggtttctgcaattttctccgtatgtgtattaccgggagcattgcatcgttttgaaagaccggcacgaaccgatgaagatcagcaaaaaaacgtttgaccggctgctgtcgttcgtcagccagtatcctcattattttctcggttccaatgctgatctgccgatcgtcggcggcagtattttaagccacgaccattttcaggggggccattatgaattcccgatggcgctggcggagacagaaagctggtacaggctgcctgactatccgaaaacggtgctgggaattgtgaagtggccgatgtcggtcatccgcctgcagagtgagtgcgcgtctgagctttccggcgcggcggatgccatcctgcgggcatggcgcggttattccgatgaggcggctgatctcctcgcctgttcaggagaaacaccgcacaatacaattacgccgattgcccggcggagaaacggtttattcgaattagatctcgtcctcagaaataaccgcacctctgatgagcatccgctgggaatttttcatccccatcaggaagttcatcacctgaaaaaagaaaatatcggactgattgaggtaatggggcttgcgattctgccgggccgccttgaacaagaaatgaaatacacggctgaagcgctgtgctcaccggacccggaggcggtcttaacggcagacccttctgcggcaaagcataaagattgggcgctcagtgtgctgcataagcggaaggtaacgaaagaaaacgcggaacagattctgaaagaggaaatcggccatgcctttgcgcggatactggagcatgccggcgtctttaaacagacagaagaaggcagagcggctttccggcggtttatccgccatttgggcgctctaccggaaaaaagccccatcccataagggacgaggcttttttttatcctctgcttctggcgatcaggctgaataagaataccacgatcgcagctccgatgattgccggaatgatggcaaagccggcaaggtgaggcccccatgtgccgagcagtccgtgcccgatccatgcgccgatcagaccggcgatcattgacccgatgattcccccgggcatactgccttttacaaataaacttccgatccagccgataataatagcgacaatcagagatacgataaaacccataaatatcacttcctattttttattatttatgcctatatgtttccttcgttttgtccatattaaacatatgaatgcgttttttataatgaacatatcaaggcgcgttccggtcttttttttcacaatgcgttgcgttaaaatggaaaccgtgtgaaaaggtgtgagcaaaggaaaaaatatttcttttgtagaatgtttaacaaaatgaaactttttgttgaccagcgatttttattatggtaaacctttatttggtattattcgttctcgctatcttttttctctatatatgctaaatgatctaaaactttttatgtttgatttacgcaagtggaaaaagctcatgcattttttgacgattttgtgacattaggtcgaaaaaaagatgaactttagaaaaaaataaagctaataagggcagattttgatagcataacaaggtagatagagaaaagattttgagaaagtacatttcagattcactacatcaataggaaggatggtgatcttcttgttcagagcatttaaaccgttacttttattagcgatgttggctgttgttttcgtactgggcggatgcagcgacatttccgttttagatccgaaaggacctgtagcagaccagcagaaagatctgattctcttgtcaatcggatttatgctgttcattgtcggcgtcgtattcgtactatttacaatcattttagtgaaataccgcgaccgcaaaggcaaagacagcggaaattacaagcccgagatgcacggcaacacgttcttagaagtagtctggacagtgatcccaattttaattgttattgcactttctgtgcctaccgtacagacgatatattcgttagaaaaagcgcctgaagcgacaaaggataaagagcctcttgttgtttatgctacttcggtagactggaaatgggtattcagctaccctgagcaggatattgagacggttaactacctgaacattcctgtagaccgtccggttttatttaaaatttcttcagcagattcaatggcatcgctatggattcctcagcttgggggacaaaaatacgcgatggcgggaatgctgatggatcaatacttacaggctgacaaagtgggaacatatgaaggccgcaacgcgaacttcaccggcgaacactttgccgaccagaaattcaacgtaaaagctgttacgcaaaaagactttaacagctgggtgaaaaaagcccaaagcgattctccaaagctgacgaaagagaagtatgacgaactgatgcttccggagaatgtcggaaaattaacgttctcttctacacacttaaaatacgttgaccacggccaagatgccgaatatgcgatggaggcgcgcaaacgccttggctacaaagccgtatcaccgcactctaaaacagacccgtgggaagatgtaaagaaaaacgaatttaaagtatccgacgataaacaagattgaaattgaacaagaaaggaggaagcccgaatgaaattgagatgggatgaattttttgtaacaggtgacccattaattctgggcgcacaagtttccattgcgctttccactatcgctatcatcgttgtactcacatacttcaaaaagtggaaatggctctggtctgaatggctgacgtctgtagaccataagaaacttggaatcatgtacattatctctgctgttatcatgctgttccgcggcggggtcgacggcttgatgatgcgcgcccagttagcgcttcctaataacagttttttagactcaaaccactataatgagatctttacgactcacggtacgatcatgattatcttcatggcgatgccgtttttaatcggtctgatcaacgttgtcgtacctttgcagatcggtgcgcgcgacgtagcattcccttacttgaacaacctgagtttctggacgttcttcgtaggtgcgatgcttttcaatatttctttcgttatcggaggttctccgaacgcaggatggacgagttacatgccgctggcaagcaacgacatgagtcccgggcctggtgagaacttctacctgctcggtcttcagattgccggtatcggtacgctgatgacgggtatcaactttatggtgacgatcctgaaaatgcgtacaaaaggcatgacgctgatgcgtatgccgatgttcacatggacgacgctgattacaatggttattatcgtattcgccttccctgttttgacagtggcattggcgctgttatcatttgaccgtttgttcggcgctcactttttcacgctggaagccggcggtatgccgatgctttgggctaacttgttctggatttggggacaccctgaagtatatatcgttatcttaccggcattcggtattttctctgaaattatttcagcgtttgcaagaaagcagttattcggttacaaagcgatggtcggctcaattatcgccatttccgtcctgagtttccttgtatggactcaccacttcttcacaatggggaacagtgcgtccgttaactctttcttctcgattacaacgatggcgatttcggttccgaccggggttaaaatctttaactggctctttacgatgtataaaggccggatcagttttacaacaccgatgctgtgggcgcttgcgttcatcccgaacttcgttgtcggcggggtaacaggggttatgcttgcgatggctgcagcggattatcaataccataatacgtacttcctcgtatctcacttccactatgtgctgatcgcgggtacggtatttgcatgtttcgcaggatttattttctggtatccgaaaatgttcggccacaagctgaacgaaagaatcggaaaatggttcttctggatctttatgatcggatttaatgtatgtttcttccctcaatacttcttggggctgcaaggtatgcctcgccgtatttacacttacggaccgaatgacggatggactgcattgaactttatttcaactgtcggagccttcatgatgggtgtcggattcttaatcctttgctacaacatctactacagcttccgctactctactcgcgagatcagcggagattcatggggcgtgggacgtacgcttgagtgggcgacttcatctgcgattccgccgcattacaactttgcggtgcttccagaagtgaaatctcaagatgcgtacctgcaattgaaagaagacaaaacggatattcatccggaaagcaagttcaagaaaatccatatgccgcacaactccggaagaccgcttattatgtcagtggcgttcggtattgctggcttcggacttgtatttgaatggttctggatgggcattgtcggcttgatcggcattctgctttgcatggtgcttcgttcatttgaatatgacaatggctactatatacctgttgaagaaataaaagagacggaaagaaagatttccgaataaaggaggcgtgatttatggaacatgcagaacacggcaattctaacgcgcctatggaatatcaatctgaaaccggcagactcaatattctcgggttttggatctttttaggggcagagattgtgttgttctcaacactatttgcaaccttcttcgttcttcaaagaagaacagcaggaggagtcttaccggctgaattatttgaagtgaagcttgtcatgatcatgacattcctgcttctgatcagcagtttcacctgcgggatcgctgttcatgaaatgcgtcgcggaagtttaaaaggcgtcgtcatttggacgatcattacgcttcttctcggtgcgggcttcgtcggatgtgagcttaacgagttcatccactatgtacatgaaggagcatctctcggtacaagtgctttctggtctggattcttcgtccttctgggaacgcacggaacgcacgtaacgatcggtatcttctggattgccggcatcttactgcaattgaagaaacgcggattaacgccgcagacgtcttcaaaaatctttatctcaagtttatactggcacttcttagacgttgtttggatcttcatctttacaggcgtctatctcatcggattggggggactataatatggcaaacaaatctgctgaacacagccactttccgtggaagcatatcgtaggttttgcgttgtctattattctgaccctgctggccctttgggttgcggtatatacggatttaagctcatcagcaaaactgtggatcattttcggattcgcatttatccaagccggtcttcagcttctcatgttcatgcacatgacagaaagcgaaaacggcgggattcaagtcggaaacacgctcttcggatttttcggagcgattgttatcatccttggttccatctggatctttgcggcgcactaccatcacggtgaccatatggatggaaaccctcctggcggtgcgaagcaacattccgaacatcaggaataaaaagaaaccctcttcgttcaggcgaagagggttttttgtgcctttattggcttcttctccggcgcaggcgcggaaggccgtaaatgataaaggcggcgatatgggcaacgatgacgttgacggcaaacaggatgatcatgagtgtgtggccgagaggggacaggctgctggttgcgtaaaagtagaagaaaacccacatgagaataattggcggtatggccgaaagagcgacttttttgttatccagccagataaagaggggtgttgcgcttgcgaccagtaaataagcaaaaaacatgtccatcttacatgtctcctttcattttatgggagcgtttccaaaatgaaatacagagaataaaatgtgtctgttttgtggtcgttttttgaacattttgttacaattattataccatgttttccaatttttgataccgctttatcgagaaatgtattgcaactattgcctcatttttggataggtacaagaaaccggaaaggtcaaataccctgtcacatttccggacaagggaatggcgcaggctgtgaacctttgctatgttcaaagaaaacatgcacagcgagggtggttttgaagtggacataacaaaagacgatgtcacagcgccggacgtcattgcgcttttgcaggagcatctgaagagcatgaccatgcattctcccccggaaagtatacacgcgctcaatgcggaccggctgcgtcagcctgacgttacgttttggagtgcgagggaaaacggcgtcctgctcggctgcggcgccttaatggagctaaacagccggcacggtgagatcaaatcaatgaaaacggctccgcatcatgtcagaaaaggcgcagccaaccggatcctccgccatatgcttgaagaagcaaggcggcggggctatcagcggatcagcttagaaaccggttctatggaggcttttctccccgccagacgcctgtatgaaaaagcagggtttcaatattgtgatccgtttgcacattataaagaggacccgaacagcttgtttatgacgttaaacatagactgaaaccccttttctgacgagaaggggttttttatcggaaaagtttcatcatgaccgaaacatttccttttctgacacgtcatatgtcgtgtagtccccaaaccgtaaaaaataaaaaggaagcaacctcatcatgttttcttgaacggtgttcatgtataataaacaatagtgacttccgatgaaaatgtaaggcgggatagaatgagtcgatataagaaacagcaaaatccctattatcagggggatttgatttttatatttggtgtgtttttaataattagtgttgcggcgatttatgcggccggacagttcgggcagtatggaggcagtgcctggatgaaacagattgtcttctatgttataggtgcgggattcatcggattattgctgtactttgatttagagcagcttgagaaactgagtctgtatgtattgattgccggcgtgctgtcgctgctccttttgcgtgtggcgccggaatccatcgcgccgatcaaaaacggagcgaagagctggtttcaaatcggcaactttaccctccagccctctgagtttacgaaaataggaattatgatgatggtcgcgtccattatatcgaaggcgggcccgaaagatcaaagatcacttcgggaagatgtcaatctgcttttgaaaattgcggcatggacggttattccaattgggatgatcgttttgcaggatgccggaacgggtgcgatctgtctgtttatcgttatggtgatggtgtttatgtcaggtgtaaactggaagctgatcaccatcatcggcggttcggccgcgcttgtgcttggcctattcttagtgcttgtaattgaatttccccatgtggcgaattcgatcggtattgcggattatcaaattaaccggattacatcgtggatgtctgactccagtgcggcaacgactcaggccgagagcgataaaagctggcaggtggatcaggccgttatggcgatcggatcgggcggcattaccggaaacggcgttcataatctgaaagtgtacgtacctgagggacagaccgactttatctttgcgattttgggtgaaagttttggatttttaggctgcgccattgcggttgtcatgtttttctttttaatttacaggcttgtggtgctgattgaccgcttgcatgcgtttaaccgatttggtgcgtttttttgcgtaggatttactgcacttatcgtgattcacaccttccagaacatcgggatgaatatcggcattatgccggttaccggtattccgctgctgtttgtcagctatggggggagctcggtgctttctacattaatcagcttcgggatcgtatataacgcaagtgtgcagctgacgaaatataaaagctacttgttcaattcttaatgtgagacggctcgtttttcgggctgtctttttttgtttagagcatttcgcttttggcatgatactctttcggatatgatatatagagaaggaggctttatatatgaacaataccatcgaaaccatacttaatcatcggtcgatccgatcatttactgacgagcttctgacagcagaagagatagatacattagtgaaaagcgcccaggcggcgtcaacgtccagttacgtgcaggcttactccatcatcggcgtaaccgataaggagaaaaagcggaagctggcggcactggccggaaaccagccttacgtcgaaaataacgggcacttgtttgtgttttgcgctgatttgtaccgccataaaaaacttgctgaggaaaaaggagaaaacattaccgagcttcttgagaatacggaaatgtttatggtcagcatcattgatgccgcacttgccgcacaaaacgtaagtgttgccgcggaatcaatgggactcggcatttgttatatcggaggcattcgaaatgaacttgatcaggtgacagaagtgcttggtacacctgaccatgtgctgccgctgttcggcttggtagtcggtcatcccgctcatccgtccggtcaaaagccgcgcctgccgaaacaagccgtatatcatgaaaacacgtacgatacgaatgaagaaaacttccgcagttatatgaaggaatatgatgaaaccatttccgattattatgataaacggacaaacggcaagcgggttgaaacgtggtctgatcaaatcctgcagttcatgaaacaaaaaccgagaacctatttaaatcaatatgtaaaagataaaggttttcaaaagaattaagaaaaaacctctcctgaccgggagaggtttttttatgtttcacgtgtaacatatttcgacaaaatggaacaaggtatataaatgtttatcatcagggatgctgataagcatacagaaagaaaaaacggcttagcagtggtacgatgttgatgaggtgacagtgatgatttcattaagtatattggatcaatctcctgtatcagaagggtgttctgcggaaagtgcactgcggaatacagtaagattggcgcaggaggcggaaaagctcggatataagaggttttgggtgtcagagcatcatttttcagagcggttggcgggctcaagccctgaagtgctgatcagccatattgcggcgaaaacgaatgacattcgggtaggatcaggcggtgtgatgcttccgcattacagcgcatataaagtggcggagaatttccgcgtgctcgaagggttgacgccgggcagaatcgatctcggattagggagagcgccgggcggaatgccgatcgcatcatgggcgctgaatgacggcgggaagcgtaatgctgatcaatatccgcagcagcttcgtgagctggcgatgtatttgcatgatgcagctgatgacaatcaccgttttccgaatctgaccgcatcaccccttattaagacggcgccggaagtctggcttctcggttcttcgggagaaagcgcgtttctgagcgcagaaatgggagcaggctatatgtttgcccattttattaatggagaaggcggagaaagcacgacagcacaatataagcgcagatttaaaccttctgcattaggtaaagaaccaaaaacggccgtggcggtgtttgtgctgtgcgcggatacggaggagaaagcggaggaactcgcggctgtcatggattatacgctgcttgcgggtgaacaggggattccgcttcacggcgtaccgtcttacgaaaccgtccgcggcaatacgtatacaccgtatgaacaaagacgaattgccgataatcggaatcggatgatcatcggaacgaagcagcaagtgaaagaacagattctggctctcagtaaagcatacggaacagaagaagtgatggctgtaaccattactcatcattttgaagataaacttcagtcataccgtctgcttcgagaagcttttgccgattaatcagaaagaaaccctgctgatgctccagcagggttgttcggttattcaatgataaaaggtttttcagtcagcacctggcttgatttccctttgttcgcggcataggccagcatataatattctcctgccggcagtgcggtgtcaccattgactttgccgttccagtcgaaatattgatagcctttatcctgctttttgtagatgccggcttggccgacaaagtcaagattactgtcatatacaaggaaggcaagctcttcggctccagccggaagataggtttcaatttggtaggttccctgcgttgtgccgtcctgtacgtcgattgacgttacgcgcggatagtccggctcttttacaatcagcagcgtcggcacttttgcgactgtttttccgccttcacgcactgtgacggttccctcataggtgcctgcctttacttttttggcattgacctttactttcgcattgacctttccggtttgatgagcggggatcacgacccggtctgtgcccgaaacggtaatgcccgtgccgttgaaagagtactcgagctgatatgattttctgatggacgattggttttcaatcgtaaaggtttcttttttcgtttcattgcctttgtctttcataaacgttccgtaagaataacttcccggggcgacaagggagtctgctttgatcgccttcatgattctgatgcttccggcgccttgcgcattatgcgggtatacgtcaccgtccgcgtccgttaaggtttccgccgtgttcataagagcggcttttatttgttccgggctccatttcggtttggcctgcttgatgacggcagctgcgccggctacatgcggggaagccatgctcgttccctgcttcgatccgtagccgtacgggtcggccggatcatgggtcggaatggtgctgacgatgtttacgccgggagcggagacgtcaggtttaatcatccacgtgtccataaccggaccgcgtgacgaaaagtctgccatttgttcagtgagcgatttagccacggataaatggaatgtcgcttttgtgccgcccgcttttaattggctgacgagtttttcgccgtcttctgatgaaagcttaaccgtcggcacggacatgcccggtacgttggcttcaatttctcccggggcattgttatacacaaccataccgatcgcgcccgcttttttggcgttgtctgctttatccacaaaggcgatgctgccccgtttgacgaccgcgacttttcctttcagatctttgccttcaaaatccttttgctcgccgatacccgcctctatgagctctgtttcttttttattcagtgcttttatgtcatcttctttgttgtaccccattactttcgctgaggaataggaaccgaaggagacggcgtactcgttcagcggcagctgtgtcgctccgacggagatagcttctctggacgctcccggagagccgacggtccaattgttcggcccgctgtttccgtttgatgtaacggccgtgacgccttctgacatcgcccagtcaagcgccgtgcttgtcgcccagtctgggttattcacagaattgccgagagaaaggttcatgacatccgctccgtcctgtacggcgcgttcaataccggcgatgacgttctccgttgttccgcttccgcccggaccgagcacacggtaggcaaggagtgtagcatccggcgctacgcctttaatcgttccgtttgccgctaccgtgcccgcgacatgggttccgtggtcagtcgacgcgcctctcggatcaccggacggcgtttcttcaggatcgtaatcgttatccacaaaatcgtatcctttatattgtccgaaatttttctttaagtcagggtgtttatattcgacaccggtgtcaataatggcaaccttgacgcctttccccgtatagccgagcttccacgcgtcatttgcccctatataaggcgcgctgtcatccatctgcggagacacggcatccttagatagggtgatgtctttatctttcagttgatcggtatgataggtgacgttcggataaaccgctttgacatcctgatcactcagcagtttcggaatttcatttgccgggagtttcatggagaagccggaaaacacttgctcatattccctgttgatttttccgtgtttaatggttttgagcgctttctttttcacttttgagcgttcgcttttcagcttgctttttgtctgtgctttgccgagttcctttgcttccgccagtgacttttccttcagctcgacgatgactgtcgtttgtttgccggtggtcatatcaatgtcaccaaatacctcagccttctcaagatcaggagtttgcggttttgaagccggcgcagcctgtgaacttgtggataaggtaaaggataagacaaaagccggaagcagataacggatgattccttttttcaatcgtgtttccccctttttctttatctaaattagaaatctagtatatatttcttgaaaattcaaaataatccttgtgacatatgactcatttatggaaattggtctgtgaataaggagggagttatacacagaatcctgtgcataactgaataaaattgtgtatatatattgttgggaacgagtgttcccatacaaaatatagatcgagtttgtggatatgtggatataccctgtgtttaagctgtgcttaaccaagggataaggtgtgtataactttttttatcggcttttccatttttcaggtcatttccatcagctttcaacaaaacttctgaaaactagtttgttttttcactcatattgtgacaaacaattcgcccggccgcgtctatcatagagtcatagggttgctagacccgctagtttttagcggagaaggatcggccgccttttccgttaaagcggagagaaaaacaggcctgcgaacaagctgtctgtcaaaaagaagcggagggatgatttgcaatgaaacgtttgctagtatctttacgggtgtggatggtctttctgatgaactggatggcgccgggtaacggaagatatccattagccgccgtgtacggaaaccaagcggcttatcataagaaagcgaagcggacggctggtgctttttcgtttgtgagccgagtccgatcggcggatttgaccgatgaaacgaaatcggcccgcggcaggctggataaaaaccgatggatgcctgtccgcaaagaattgccgaaacgggagcgcgcgggtccggcacctttacatcatatgaaaaagagggtacaatcccactaaacatatgaacgggagcgaacctcttgagaatagacaaagtattaaataacaatgcggcgttaataaaagaagacggacgggaaaagatcgtaatgggtcccggaatcgcttttcaaaagagaaaaaatgatgtgattcaaaaacataaaattgaaaaaatatttgtcgtgcacgacgaaaatgaaaagttcaaacaagtgttagaaacgcttcccgaagagcatatagaggcggctgaagatatcatcagccatgcggagggagagcttgcggcgcctttgaacgatcacatccacattgcgctggcggaccatttatcctttgcgatcgaaaggattcaaaacggccttcaggtgcacaaccgattgcttcatgaaattaaggcgctttataaaaaagaatatgaaatcggccgctgggcggttgaacacgtgaaacaaaccctcggtatatcattgcctgatgatgaggcggggtatatcgcgcttcatatccacactgccaaggcggatgccaaaagcatgtattcggcgatgaagcatacaaccatgatcaaagaaatgatcgaaaagatcgaatcctttttcgaacagaaggtggatgaagacagtatttcctatcagcgcctcgtcacgcacttacggtatgcggtcagccggttggactcaaatgaagcactccattccatggacgaggagatgctttatttcatccaaaaaaagtatccgtttgcttatcggtgtgcgcttgaactggcggcgtttttaaaaaatgaatatgatttggaactgccggaatccgaggccggctatattacgctgcatgtccagcgtctgcaaaaaaacccggaataacgcgtctgtttcgagaaacagactttttttttgaaaacatattgacgaaagcgctatcatgaaataaaatgaaagcgcattaaaaaactgaatcggcgggattgtgactggtaatgcaggcaagacctaaaatttgcgtacatgaaaaagggatcatgctgacctttttcgttggcgaattttaggtcttttttgattttagaaagggggatacatcatgaattatcaagaaacggcaaaacagcttatcaaacatatcggagggaaatcaaatatcatcagcgcgacacattgcgccacacggctcaggctcgtcattcaagatgaacagaagatcagccaggccgatattgaagagacagaaggagtaaaaggggctttcagcagctcggggcaatatcagattatattcggtaccggccttgtgaataaagtgtatgacgctttttcaaaagaagccgatttggggcgggaggatcgtgagacacatcaggacgcggcgaaaaaaaagctgaatccggccgcaagatttgcgaaaacactgtctaacatattcgttcccatcattccggctatcgtggcaagcggacttttaatggggctgctcggtatgatgaaggctttccactgggtgtctgaacaatcatcgctgtttaagcttttagacatgttttcaagcgcggcgtttatcttcctgcccgtattcatcgggttcagtgcggcgaaggaatttggcggcaatgcctatctcggtgccgtgctcggggggattatgatccatccggcgcttttgaatccgtgggggcttgcggatgcatcgcctgattttatgcaactcttcggcttcgacattgcgctgctcggctatcaagggacggtcatccccgtactgttagccgtttacattatgagcaaagtggaaaagggcacgagaaaaatggtgcctcacgcattcgacttattggtcaccccgtttgtcacggtgattgtcacaggatttatcacctttatcgcaatcggtccgcttggcagggcgatcggatcgggcattaccgtctcgctgacatatgtgtatgatcacgcgggcattgttgccggacttcttttcggcggtctttatccgcttattgtgctcaccggtgtgcatcacagctttcatgcgattgaggccggcctcatcgctgatttgggcagaaactatatccttcctatctggtcgatggcgaatgtcgctcagggcgcggcgggactggctgtatttttcctgacgaaaaaagcgaaaatgaaagaaatcgctctgcctgccgcattttccgcttttctcggcgtaaccgaaccagttattttcggtgtgaacctaaggtaccggaagccgtttatcgcgggaatgatcggcggagcgctgggaggggcctatgtcgtggtgaccggcgtcgccgccaatgcttacggtctgaccggaattccgatgattgccatcacggctccgctcggtttaggaaatcttataaactatctgatcggaatgggcatcgcctctgtctcggcgtttattgccgcttacattatgggagctaaagaaaaggaggccgtcaaatgaggacaccggatcaagagctgcgcctgcaggctgaggaagcgaaaaagaagcggcaagaaacagccgcgtcagatccataccgccagaactatcatgttatgccgccggtcgggcttttaaatgatccgaacggcgtcatccaatggaacggcgtatatcacttgttttttcaatggcagccatttcatacggggcacggcgcgaaattttgggcgcatgtgacgacgaaagatttcgttgagtggaaagaggaagaaatcgcgcttgcgccgggtgagtggtatgacaaaaacggctgttattccggaagcgccatcgaaaaagacgggcggctctgcctgatgtacacaggcaatgtccgtgacggagaaggaaatcgggaaacgtatcaatgcctcgccgtatccgaagacgggatcgtatttgaaaaaaaaggaatcgtcgtgcgtctcccaaaaggctataccgctcatttccgtgatccgaaggtttggaagaaagacggagcgtattacatggtgctcggcgcgcagacagaaaagctcaccggaagcgctgtattgttcacatcagagaacctgacggattggacgtttctcggttcgattgcgggggcggactcgggcggtctcgggtcattcggctatatgtgggaatgtcccgacctgttttctcttgacggaaccgacgtgctgctcgtatgtccgcaggggcttgaagccgacgggataaaatatcataacagccaccaggcgggctatttcctcggcaggctgcatacagagccgccagaatttaagcacggtgaatttacggagcttgacagaggatttgatttttatgcggcgcagacgctggaagatgataagggacggaggattctgttcgcgtggatgggcgttccggatcagcatgaggacaagcatccgacacatgcgtatcactggattcactgcttaacgatgccgagacagctgtcactgtccaacggcagaatcatacagcgcccgctcccggaaatgaaatcgcgccgcacggatgaacaaaagcgccgtcttcaattgaattgctcgtctgtaagcctcccggtgaaagatgcgtcccgggctgaagtgctgctggaagacattacttgcgaatccggttttgaaatctcaattcggggcgcggcccggtttatatttcatcaggaagaggggctggctgtgctggagcgcaccgctttcagcggagaagaaaaagaaaagagaagctgcgccatcagcgagctgcattccgtccagctctttctggatgcatcctccattgaattgtttttgaatgatggagaagaggtattcagcgccagatattttcctttcccgggaaatgatgacgtaaccgtcacttcggttgggaaaacggaaataaatgcctcaatttggacacttttgtagaaaatcgttcttttttcttatgtgaaacctatgccatctgtgctattcttcaaacgaaagcctatgattccaggaataaaaggagttgttttctcagttttgaaaaatcagaagatgacgccgaaatgtttacttgtcaaagctgcagagcaagtggaagataaacgggaagaatataaagaagtattgcttcagctgaatcgcatgctcaagagggctgagccgcacaatgaatggagtgatcggctgaggcatacatatgaacagatgaaggaatatgcgctgtttgtgcaatcgattgagatgtttttgcggtcatccgcgaaaaaaatgaaataatccccctcgatcatgagggggatatttattttattttccgctaagacgcatcgccgaatgtttagtcggtccgatgtattggttcagcgggaaggattctttgattgccgcagtgataaattcttttgccgcatagatggcttccttcacttcagcgcctttggccagttctgccgtcacggcggcggagaatgtgcatccggctccgtgcgtgtaaggtgtatcaatcatttcgctttctaatacttccgcggtttctccgtcatacagcacgtcgatcgctttttcatgtttcaatttgccgccgcctgtaatcaatacatatttcgcgccgagttcgtgaattttcttggccgcttctttcatgtcttccaccgtttttaattcatccataccgctcagctggcttgcttcaaacaggtttggcgtgatgacggttgccagcggcgccaattgggtgcgaagcgcttcggcatgctccggatacagcacttcgttcgctcctttgcagaccatgacaggatcaataacgacattcttcagctgtttttctttaatcgttttcgccgcaagctcgatgatctccacggtagggagcattcccgttttcatggcgtctacgccgattccgtcaacaatcgtcgccagctgtgcgcgaatcgtatcggcatcaatcggaaatacttgatgatcccagctgttctccgggtccatcgctacgatcacggtcaaagccgtcattccgtatacgtttttttcttgaaatgtttttaaatcggcctgaattcccgcgccgccgctggaatcagaaccggcaatagtaagtgctttgtgcattgacatatcaatggcctccatcagtgttttatatctcattatagttagattttctcccgatcacaatacggaaggcttggaggaatgatttgacagccgcgggggatgtgcgtacaatacctacataagattactaggtaagggtgagaaaataaatgctcaacagggagcttgtaaagggaagcacggtcattctggtgctgacgctgctgaatgaacggcccatgtacgggtatgaacttgtgaaagaaatggagaaaagaagcgggaatgaactgcaaatgaaggaaggcacgctgtacccatcgcttcataagcttgaacgccaaagctatatttcttcttactgggaaaagcagaccaaagggcccgaccgaaaatattaccggatcaccgatgaaggaaaaaacattctagccgaacggacgaaggaatggaatctgttctccgctctgatggaccggatgctgaagcggggcgggcagaatggataaagacctttatgtgcacgaaatcagaaaagggctggaaggcaaggccggaagccgtgaattattaaaggaaatcgaaagccatattcatcatgccatttgtgttcatctggaaaaaggcaaaaccgaaagcgaagcgatggagcttattctgcgggaagtggggactccgtctgagattatctctgcttttcaaaaagcttcgacggtgcccgcgcggacttttatgctcttttatctgttctgcaactgcggtctttttgtgatgggggcgatgattacgatgatgcacgcgtggaggattcatcccgcagttgacgcgctgtggaaagggatttccgtgtcagtatggctgattatgatcggttatgtgctgtattggttccaaatcggctatcaagctggcaaagagttcggggctggcggcaaaaagcttgctgagcggacggtatgggcttcaatggtgccgaatctatgttttatgtttgtctttttgttcaatctggttccggctgggctgtttccttcggcggtcacaccgagttttgcggcagtatgcgccgttgtgacggtatgttttccgttttgcggcaaaataggtttttacgcaggcaggcagagacttgcctgatctttttcactatatacatagggaatctatataggggtgtttatatgagattaggttcgtggatgtacggcgcgtgcgcccaaatagccgttaccgtatttaccgtctgcggcttggttcttgccttgcccgttgtgagtctttttattatggttctgaatgggatgcaagacgctacttttgttgttttcagtattttgcttcttctattgttttatgcgctgggatggatttgggctgtttcgtttgcgcgtgagtggaaggtgaaacttttcgagctgcaggtcagctcgctcattccgctggcgggtatattatacttgtacattgacagcggggtgagtataccggaactgattcatgattggcatgaggatggatgtgcgcttgtcccgccggcttttgtctgcttgtgcacatgctatgcgatggtgttggtgcctgtttatcaatcaaaactgtggaatgccatggaggcgggcagacttaatgccaaggcggtatgcactgtttggggagaccttctgatcattctggttttgctggcggggatgacgtggatttgtttctgaatgggccgaaatcaaaaatcccccctgatctctccgccgctttatgttttaatagaacatgagaaaaagcagaaggagcgggtcatgaatatatcaattgtcatagtcacgtataatcggattccggctttgtgtgagctgctggagtcgatttccaggcagaccataaagccttatgaagtgatcatcgtaaatgatgccggggaatcggtcgaacaagcgaagcagctgtacagcgatctgccgattcagattattgatttagaacagaatgccggacatgtggaagcgcggaacgcaggtgtgaaaaaagcgtggggtgattatatcatgctgtgcgatgatgatgatttcattacgccgggccatttggaaagaatgacggctgcacttgctgatgcggattttgtccattctgacgcggaaattgtgtcatttgaagaacggggcggcacgagatacccggtgtcacgaaagccgttcgcctatacggcggattttgcggatatgcgggtattttccacgtacgttccgtcaggcagcatgtacagacgttctctgcatgacacgttagggtattttgatccggatgtccataattattgggactgggacttttatttgcgcgccgcgaaacagcaccgtgtgaagcgtgttccttgcgcgagcgtcatatatgcgttttttgagggaggcggcaatcagtccgcggatctcggcggcaaacggaagcggtacttagaccggttaagcgaaaagcacgggcttggggagctcccgacgaaaaacttcgcggttcttctagaagagccggacatgaagaggcgggaggcgccgactgacattgtgtgggacggaaagcccgtccattcaagactgcacagttcataagggggacggacagtttgaaacagcttttaaaagacagctggtggaatcagctgaaagatgaatttgacaaaccgtattatcaagagctgagagagatgctgaaacaagaatacagcagccaaacgatttatcctgacagccatgatatttttaacgccttgcattatacgccctatgaggatgtaaaagcggtcattctcggacaggacccgtatcacgggccaggacaggcgcacgggcttagtttttccgttcagcccggggtcagacagccgccgtctttgaaaaatattttcatagagcttcaggacgatatcggctgccccgtaccgaaccacggatcgctcgtcagctgggcgaagcagggagtgcttttgttaaacacagtgcttacggttcgccgcggtcaggccaattcccacaaaggcaaggggtgggagcggctcactgaccgcatcattgatgtggtgaatgaaagagagaagccgattgtctttatcctgtgggggcgtcacgcgcagatgaaaaaagagcgcattgacacatcgaaacacattattattgaatcgactcatccgagcccgttttcggcaaggaacggttttttcgggagcagaccgttttcccgtacaaacgccgcccttgaaaaaatgggggagcagccgatcgattggtgcatccccgacctgccgcaataaacggttttttgaggcgcttccgcccggcggaagcgtcttttttgatgttccgggcggtatgccgtcagaaaaaataacaaactcaattctgcgatccgctcagaaatttgataaaatgcaggaagaagacaaattactgctggaggatttactcatgaacatacatatctctgctttaattcagaagatggaagaagaactgaggcaggcgaaaacggcgacccgcaccgaggaggtcaaaatgcacgcggccgccatccgctctctgtgtgatgtcgtgctcggcactcagacgcacaccgctccggcgcctgtgcagaatccgattccgaaagcggcgccgaaaccttccgcgtctccttcgacagacccgctgctgcttgaaaaaatgatgggcagcgccgggctgaaccaatatcagaaaaaagcgaaagacgaacgtgaggaagacggaaacggggattccattttcgatttttaacaggagaggttgattgacttgaaactgatactcgggggtttgcaatggacggcatttatgattgcggctgcgattgtagttcctgtcgccatcgcacaatcatttcacttgaaccatgccgattctgccgcattgattcagagcacattttttgtgcttggcgtcgctgcggtcatccaatgtctccagggacatcgtctgccgattaatgaaagcccggcaggcttatggtggggcgtatacacgatttacggcggactgacgggcacggtgtttgcgacattcggcgagacgctgcgggcgctgcagggggcgctgttattaagcgctgtctttttctttttgttcagcctttttaaagtgattgaacggctggccgtgctgtttacgccggttgtgaccggtgtgtatctgctgctgttggtcatgcagctgagtcagccgattgtgaaaggccttttgggcatcggctatttaaaaaacagcgtcgacggccttgtattcgggctcgcaatggttgtgacggcggcgatgttcatcatgtcccgatcgaatgttacgttcttaagacagtatgcgattctcctttcgcttgccggcggatggatcttattcgccgtcttcggcgctgccaaaccgattcaaataccggatcgcgtgattcagctgccggttctttttccgtttggaaaacccgtgtttgacagcggcctgatcattacgtcactcttcattaccgtgcttttgattgtcaacatgctcgcgagcatccgggttgtagaagcggcggtgaaaaaattcggcggcaccgttgggaaacggcgtgagcgtccggcagggtttgcggcttcgatcagccaccttttgagcgggctgtcagggggcattgcgcctgtgccgatttcaggggcggccggttttattgagacgacgaagcttccttcgaaaaagccgtttcttttgggaagtgtatttgtcatgatcatcagtatgatcccgctatttatgaatgcgtttgcgagtctgccctcaccggtcggctttgcggtaaacttcgtcgttttctccacgatggcgggtcttgcctttacggagtttgactcttatgagaaagcggagcaaaaacgaatccgttccattatcggtctggcgctcctcacgggggtcggcgtaatgtttgtgccggagagcgcgttatcagggatgcatccgatcctgatttcgctcttaagcaacggccttgtgctcggaacgctgctggcgatagcgattgaccgaatccagcttatcaaaaagaaaaaatccgacaatctcgtgtcatcggatgacggacgttgaattttgccgatgttgggttatgattgaattggaaactttaacgaaaaggcgggagaaaaatagatgaaagtgtttattattcttggtgcgattaacgctttattggccgtggcgctgggcgctttcggcgcgcatgggcttgaagggaaaatccccgataaatatttgcaggtgtggcacacaggcgtgcaatatcatatgtatcacgcgctcggtcttctggctgtcgcgtttttggctgaaaagctctctggcgcaggcagtgtttctgttgcgggctggctgatgtttgcgggcatcgttctgttttcaggaagcctgtacgtattgagcgtgacgcagatttccattctcggcgcgattacaccgctcggcggcgtggcgtttatcatctcttggattatgattatcgtcgcggccgtcaaatatttataaagaaaaaaagccaatcctctgtcaagtgagcgattggctttttgatttatctcggagaataagaagacatggagtacggataagtataagcgatttcctcatcaaatgtgatgtaatcaaggtaaatggtcagaagcagatagcgggtgcccgttttcggatcgctgatgatgatatggtcacgtcccgccgcctcaatcacaccgcggaaaatctttgaattccattctttgctgttttcgaatgtcatataaatcgtcgccgttttgccccggttcaaccgcagaatattttcaatgtatgactcttcaatcggcagcatgccgggaacgttttgtgacgatgatggacctgacgggatttgaaagctgccgccgccctgctgctgcggctggccggggaaccccccgccgaagccctgctggccttgctgcatcggcattgtcatttgctgctgcatcggcatcatttgtgatccttggccctgaggctgcggataaggattaggcccgagctgcggctggaatccctgcatatccattcccatccccatcccctgcatttgctgatattgattctttttcggtttcatattgttcctcctttgatgaaaacctcttgatgctgaaacctcctgacaagtatcagacagccgacagagcggctgctgtttttatctattccaccatatgagcccaaagaaagatttatgcgaaaaaagaaaatacgatccaatgtttccggatatcagagccggctttttttgtgcgcgcaatgctgacttttcacataatagtctgtatccctagcgcatcttccgcataaggaacatatgatagcggtagtttcaggtgcgaaaagggggtgacgagttgcctaaagtgtcagtgatcatgacgagctataacaaaagtgactatgtggcccgctctattaaaagtattctgtctcagacgtttacggactttgagctgttcattatggatgacaactcaaatgaagagacattggcggaaatacgtccttttctcacggatgaccgcgtccggttttatcaaagcgatgtatcgggcgtcaaagaaagaacggaaaaaacacgctacgccgccttgattaatcaggcaatagaaatggcggagggcgagtacgtgacgtatgcgaccgacgacaacacgtatgtgccggaacggcttgagaaaatggtgaaagagcttgatgaagacccggaaaaagccgtcgtgtattcaagttccaaaacctatcatctgaatcagcggaaagagacggtgaaggagacggccaggcccgccgaacggatcgtgtggaacgcgccgtgcgccattgaccattgttcggtcatgcaccggttttccgtgctggaacaggtcaaatcggcattcggttcctattgggatgaaagccccgcgttttaccgtatcggtgacgcccgttttttctggagagtgaatcatttttatccgttttacccgatttctgaggaacttgatatcaattatattaccgatcaatccatccattatcagcttttcgcggcggagaaaaacgagtttgtgaacagccttccgcagcagaccacgtgccgggagctgagggaatcattaaaaaagcttggaaaggggtgagggcttgtcggcatacttagcgaactattgggtgctgtaccggcagtatattgacctttttcagtcacttcgctacaaagacatcccgctcgcattgatcagtaatttttatcaatatatcagtccggcgcttcgggagagcatggagcagaacccggagcttttcggtccggcggatcagcatattcctgaagccggtattcagccttattatgatcaaaaaaggcaaaacattaagaaaacagatgagaaaccggtaaacggaaaagtcattctgcatttcgatcatcttcggttcaccgagggaaattaccggcagtttgatccggcaaaaacagcggtactggccagatggagtctgcctgaccatcatgggctgcccgttatctgcaaattggagctgacgggaatggggcaaaaagggaaccccgtcccttatattgaaaaagcccattccattttgaaagagcttcacagccatcccgctttcggaaacagagaatttcaggaacgactgtataaagacatcccgttatttattgaagcgattgacgccgttgatattttgtttacggccgagaagatttccgccgttgtagtcggcacgacggaggatatttacagccgtgtgctggcgctgatgtccgcgaaaaaaaacgccgtcagcatctgtcttcagcacggggcgctcatgggagatgaagcgtttctgcccgtatttacggactatcaggctgtattcggggcttatgaagcggagtggtataaagcaaaaggctgcagggaggaacaaatcatcatcacggggcatccccgtttcgacgagattttctcaagagagccgatagatcgggacacgttttaccgcaaactttcttttctcccgtcacagcggacggtgctgatcgccacgcagccgttttctgatgaattttatacgggagtgcttgaagagcttgccggccaaaagaacatgcagctcattattaaaccgcatccgtgggaaatcggcaaaaacaagctggatgcttacaatcaggtgctgcggaaatataaagcaggcaaaatcatcaaaaaagagatggagctgtatgatattctcccgtttgttgacgctgcggtgacacagacatcaacggtcggtcttgaagcgatgctgtttcaaaagcccgtgctgatcggaaaatcagcgggaacccgccgatacccttattatcattcacttggagaatttgtttttgaggacccgcaggcactcgctcaggaattaatccggatatgcgaaagccccgcagaatatcaaaaagcggaacaggcgcgccgtgcttttgtcgccgcgaactacccggttcaggattcgcttgccgctttatgtcaagtgcttcaggaaaaaaccggagtcagcttcagacgggttgacccttcataaaaaagataggagcgcaaaaaaaatggtgcaaaaaagatcagcttttcttccctattcattgcccatgatcgggaaggacgaaattcaggaggttattgatacacttgaatcgggctggctttcaaagggaccgaaagtagaggcgtttgaaaaagcctttgccgcctggacgggggcaaagcatgcgatcgcgctgaactcatgtaccgccgctttgtttttggccctgaaagcgaaagggatcggtcccggcgacgaggtcatcacgtctgccgtgacgttcagttcaacagccaatacaatcgtgcacacaggcgccgttccggtgtttgctgacatcgatccgcttacgctgaatgcagaccctgaaaaaattgaggcggccgtcaccccgcggacaaaagcgattgtacccgttcatttcgccgggcagtcgtgtgatatggatcaaattttggccattgccgaaaagcatcagttatttgtcttagaggatgccgcacatgccgtgtataccacttataaacagaaaatgatcggatcaatcggtgatgcgacggcattcagcttctacgcgacaaaaaacctggcaaccggtgaaggcggcatgctgacgacggacgatgacgggcttgccgatcagatcagggtgctcagccttcacggcatgagcaaaggcgcgtggaaccgctattcttcaaacggaagctggtactacgaggtcgaaacgcccggctataaaatgaatatgtttgatcttcaggcagcgcttgggcttcatcagctgaaacggattgacagcatgcagcaaagaagggctgaaattgctagccgctaccaggacgctttcagagacatgaaagggctcaccgtcccatatgtcagtgatgacgggcggcatgcatggcatctgtatgttcttcaaatagaggagcaggaggccgggatcagccggaacgatctgatttccgctttgaaagaccaatataatatcggcacaagtgttcattttattccggttccgttccatccgtattatcaaaaaacgtacggatataaggaaactgattttccggccgcggccgcgtattatcaccgcaccgtatcactccctctttatccgtcaatgacagatgatgacgttgaatacgtcattgcagccgttacggatatcgtcaaaggggctgattaggtgtacagactgagagaaaatcttgcacaggacatgattcatgccttcctgcatcagaagggcattcagcccgaagcctatgaatcgtcgctctgtttattggaagaaaacagccttcaaggcgtgattttatatgaaaactcttcgtgggaaagtcaattgttccgaaaaaatatcatcaatgtgaagcttgcagccgcaaacagcaccggacagctcaaaaggctgtttcaggaattttacgcggcaaggcgggcggacggcactgattttatatttattaaaataccagctgaagatatcggcgcgatgcaggtcgtgcagtcgcttccgaacgcttattttgtagggagtcttctcaagctcgtcagtccggtgcgtgtatataacagcacgccgccgtttgagattacagaagccggacccggcgacacggaagcgatcagccggctggcccgcgacgcctttacaaaaagcaggtattatcaggacccccatctcagctataaaagtgcaaaccgtctgtttgaagagtgggcgcggaataacgcggaaggcagagcttcgttacaattcctcgccaaatataagggagagaccgcgggctttgttcaggggctgtctaaaggcgatgaattcgtccttgatctgatggcggtaaagccgggatttgaaggaaaaggagcgggattccatttagctgcgcacgtgattgaacaatcattgcgctttcagcataagactgtatcagcgggaacgcagctccacaatgtaagagccatccgcctgtatgaaagaatgggatttaaagcggatgcgtccttttactactatcatgtgtggcccgggaaggaggcggactgatggcatcatgcaaaatcggaacgaagtcaatcggcgaaggttcgcccgtattcatcatcgccgaagccggaattaatcatgacggaaaactgagccaggcgtttgaattgatagatgcggccagtgaggccggcgcggatgcggtcaagttccaaatgtttcaggctgacaaaatgtatcagaaagaccccggcttatacaaaaccgctgcgggaaaaaacgtctctattttttctttggtgcaatcaatggaaatgcccgctgagtggatcgaaccgctgcttgaatattgtaagaaaaaaggcgtgctgtttttaagcacggtatgtgacgaaggctctgccgacttactgtatgcgacttccccttcagcttttaaaatcgcctcctacgagctgaaccatctgccgttattgaaatatgtcgcggggctgaagaccccgattatcttttccaccgcgggcgctgatatttcagatattcaggaggcttatcaaaccattaccggcgaggggaacaaagaaattgcgatcatgcattgtgtggcgaaatatcccgcgccgcctgaatacagcaatctgagcgtcattcccatgcttgccgccgcattcccggatgctgtgatcggtttctccgatcacagcgcccatccgtatgatgtgccgtgcgcggctgtcaggctcggagcgaaactgattgaaaagcattttacgatcgataaaaacctgcccggtgctgatcactccttcgccctcaatccggatgaattaaaagaaatggttgcggcgatccgctcagttgaagcggagctgcggcaggggcatcacgctccggtgccggaagtgctgtcgggaagctcccataaaacgacgacaccgattgaaggggatatcagaaggtttgcttacagaggcattttttcaacagcgccgattcaaaaaggcgaatattttacggcggaaaaccttgccgtccttcgtcccggccaaaaaccgcaggggcttcacccgagatattttgagcttttaactgacggcgcgcgtgcggtcagggatatccccgccgacacgggcatcacttgggatgaccttttgacgaaaggcagcccatatgatgactgacattttgtttatcattcaggcgcggatgggaagcgggcgtcttcccggcaaagtgctgaaaccgatcggcgggtatacgatcctcgatatgattgtcaaaagggttcgtcaaagtgcgttttacgatcaatcacgggataatctgatcgtcgccgcgtctgacagcaagaccgacgacattctgtctgcgcactgcctcagcaaccgctaccgtgtccaccgcggcagcgaacagcgtgtgcttgaccggtttgcacaagtcatcgaacaagtaaaaccggacatcgcagtcagactgacgggggataacccgtttgtcgacccttcgctgcttgattttctgattcaatcgcatttagatcagcacgcagactacacgtatatctgcggtacaccgctcgggatcggcggcgaggcggtgaacgcgcgccttttaacggagatcaatgcggacaaaacgctggcggacaaatatcaggagcatgtcacccttttgataagagaatcccctgagaggtaccggcttctctttcctgagcccccgcaggaactccgggctcctcacttgcggatgaccgtcgatacagaagaggactacaggctggcccgcgagctgtacgtaaaagcgggctcgcgtcctgatattccggcaaaagaattgatccatctgctgaatcgtgatccggagctcagggccattaatcaaatgatccggcaaaaagaggctgattagcgtgcgggttttgattttcgcggacgggggccgtgacatcggcatggggcacgcggttcggatgaagctgcttgccggtgccattaagaacaactgctcaataacgttctacacaaataaagaggcttcttcttatctatcatctgatcaatgggaagtgatcatcaagcctgacaagggacagaaggaatttattgtccgggaaataaacacgcgggctcccgaccttctcatattcgatctgctcgatatgccgtgtgactggctggaggaaatcaaaaagcattcatcggctcgtatcgtcttatttgaagaaaagagggaacatgtcattcatttatgcgatgccgttataaacggcatttacggcgggctgaaaagccggacggttcaaatgggcagcgccgcggtatatgaaggcccggattatatgattcttcatccgggttttgaaaaagcaaagcagctctatcagctgagaaaagaatgccgaaccatattggtctctttaggaggaagcgacccgaagaagcttgtctttaaagtgatggaagcatgccgccgcatccctgatattcagcggaaacgagtgatcatcgtcatgggcggcgcggcgcctcatgctgatgacgtgcgcgcgcatctcacacaaatgccttatgccgagatggtaaggcagacaaatgacatggccgcgcttctcacgagggctgatatggccatcgtgtccggcgggatcaccttatatgagaccatttgtacaggtgtgccctgcatcgttctttctcaagtggagcatcaaactgagacggcggaaaaattcgccgcacgagaggccgccgttcatctcggcctgggagaacacaccgcggcggacgtgctcgctcggcatatgtctgagctggctgctgattatccgagacggctcgggcttcatcagaacggaaagccgctggttgacggcaggggcattaaacgggcggcggcgattctttatgatttgtgataaaaccacacgtaaggaagtgttcatgtgaaaggtgttatcttagccggaggcaccggctcacgccttatgccgctgacaaaagcggtcaataagcatttactccctgtcggtccatatccgatgatttactggtcgatcatgaagctggaagaagcggggattacggatatcttgctgattacgcaaaaagaatatattccgcaatttcataaacttctcgaaaccggagaagagctcggcgtctcaatcacatatcaggttcagccagccgcatccggcatttccgacggtttatcatacgcaaagcggtttaccgggcgcgatccgttcgttctgcttttgggagataatatttttgaagattcattaaaaccttatacggagcgtttcgcaaagcagggaaaaggagcgaaagtgctgctgaaagaagttgacgatccggagcgcttcggcatcgccgagattgatgaggaaaacaaacggatcaagtcgatcattgaaaagccggagcagccgccgaccagactatgcgtcacggggatctacatgtacgacgcagaagtgttttcttatattgaacaaatttctccttcaaaacgcggcgaactggaaattacggatgtcaataatttatacattgaacacagtgagctgacgtatgatgtgttaacgggctggtgggtggatgcgggcacgcatgaatcgctctatctcgccggaagcctggcgcatcaggcattacagaaaggacaggagcattaatcatgccaaaatcatatttaattacagggggcgccggatttatcggccttaccttcacaaagatgatgctgaaagaaacagatgcgcagattaccgtcctggataatctcacgtatgcaagcaggccgcttgaaatagaagccttaaaaaagaacggccgtttccgttttatcaaaggtgacatttctgaaaaagaggacattgacaaagtcttttcccaaatgtatgacgctgtcattcattttgcggctgaatcccatgtggacagaagcataaatcaggcagagccgttcatcacaacaaatgtgatgggcacataccgactggccgacgcggtgttacagggaaaagccggcaggctgattcacatttccacagatgaggtgtacggagatttggcgccggatgatcccgcttttacagagacgacgccgctttctccgaacaatccgtattccgccagcaaggcaagctcagacctgcttgtcatgtcttatgtgaaaacccataagcttcctgccatcattacgagatgcagcaacaattacgggccgtaccagcaccacgagaaaatgattccgaccattatcaggcatgccgtaaacggcacgccggttccgctgtacggcgacgggatgcagatcagagactggctgtttgccgaagatcattgccgcgccattaagctcgtgctggaaaaaggaacactaggcgaaatttacaatatcggcggaggaaatgaacggacgaataaagagcttgcgtcatttatcatgaaggagctcggtgtcgaggaacggtttgctcatgtcgaagacagaaaagggcatgaccgccgttacgccatcaatgcttcaaagctgaaaaatgagctgggatggcggcaggacgtcacatttgaagaaggaatgagaagaaccattcgctggtatacagacagccaagactaatcggaaagaaggggatccgattgacgaaggtattagtaaccggagcggccggtcagctggggcgggagttatgccgccagctgaagcgggaagggtatgaagtgatcgccttgacaaaagcgatgatgaacatatccgaccagcgttcggtgcggcactcgttcagccattacaagccggatatcgtcgtcaatacggcggcatacacctccgttgacaaatgtgaaacggagctcgacaaagcgtatttaataaacggaatcggcgcttattatgccgcgcttgaggctgaaaacaccggcgcgaaattcattcacatcagcaccgattacgtcttcagcggcaaaggaacacggccataccagaccgatgatcccgcagatccgggcacgatttacggaaaaagcaaaaaactcggcgaagaactgatccggttaacgggaaaaaaccacaccattatcagaacgtcgtgggtgtacggcagcggcgggcacaactttgtcaatacgatgctgaaacttgcggatacacatgatcaggttcgtgtcgttaacgatcaagtcggagcgccgacgtacacaaaggatttagccgaaacggtgatcggtctgtttgacaggccgccgggcttgtaccacgccgcaaacagcggagtgtgcagctggtatgaatttgccaaggctatttttgaagaaagcggcagaaccgccgccgtgctgcccgtcacgacggaggaatacggaaatgagacgccgcgccccgcttactcggtgttgagtcttgagtcgattgaacggcaggggctcggcatgaggcattggcgggaagcgctaaaggattatttacaaagggagggacagtgcaagtgatcgaaggcgtaaaaattaaaaagctgatcaaacacagcgatgaccggggttttttctcagaactcgtccgtgacgatgaacatctcttagagcgtttcgggcaggcttcctggtccaaaagctatcccggcgtcattaaagcgtttcactatcatgagaaacaggatgacctgtggtttttcccgacgggccacgcccaggtcgtgctgcatgaccttcgcgaagagtcggcaaccaagggagaaacggatgtctactacatgggagaagacaatccgatgctccttctcattcccaaaggcgtcgcacacgggtacagagtgctgggcgaaaccccgctgaccattatttatttcacgacaatgtcctacaatccggatcagcctgacgaaaaaagaatcccgtggaatgatgagagcatcggatttgactggcagacggctcatcggtagcgcacaagacgaagacagcggatgtcttcgttttttgtgctggttcatctcgtgaaaaataaatgattgaatattccaaaaaataatttacttccatggataaaggtggtagattattctcaggaaaagagaaacccaattcgcgaatggaatcatcagacacgcttttccggcagaggacgctctgaatcctatatgatctggaggaattcatgatgttaaaaagaaaatcattttctgcctttctcatcagtgctgcggtattttcagctgtgttcttgccatcttttcatgcgaacgcccaatctgccgttattgaagcgaaaaccgtcaatagtacgaaagaatacgcgacgtctgatattgaagtcacatacaagccgaatgcgctgcttgccgtcggcgccgttgaatttcaatttcctgacgggttcaacgccactgtgagggactctgtaaacggaagaacactgaaagaaacgcaaattctcaactacggaaaaacggtcagacttccgcttacccttgacttattgggcgcgtctgaatacaatctcgtcctggtgcgtaaaaaccttccgcgcgcgggcacgtatacaattaaaggcgattacgtaaacggtttgggggccggcagtctctacgccgaaacaaagctggttattgacccgcgttaatccgggatgaaagaggctgacaacagcctctttttttatgcgcaaaatcctggcatgaatcttgcatataaaaaggggtgtaacgacaatgtgaaagggattgatgggttttggtgtaaaagcgcttacatttcgttctgccggtaattgaagcttacacgtaaaatacgatgaggtgataaaacatgtcagccaacccgctttctaaaagcactcagaaagatgaagaaaaagaagttcttaatttgttcttgtccacacaatcgatcataaaagaagccctgcgcaaactgggctatcctgacaatatgtatgaactgatgaaagagccgatgcggcttttgaccgtacgcatccccgtcaaaatggacaatggctcagtacaggttttcacgggctaccgctcacagcataatgacgcagtcggcccgacaaaagggggcgtgcggtttcacccggaagtcagtgaagaagaggttaaggcgctttccatctggatgactttaaaatgcggcatcacaaatcttccttacgggggcggaaaaggcggcatcatctgtgatccgcggacgatgtcattcggagagctggaacggctgagccgcggatatgtgcgcgcgatcagccagatcgtcggcccgacaaaggatattccggctcccgacgtatataccaactcgcagattatggcatggatgatggacgaatacagccgcctgagagaatttgattcaccgggattcattacgggcaaaccgattgttctcggcggttcacaggggcgggagacggcgaccgcgcaaggtgtcacgatttgtattgaggaagccgttaagaaaaaagggattccgttggaaaatgcgcggatcatcattcaggggttcggaaacgcggggagctttctcgctaaatttatgcatgacgccggcgccaaggtgatcggcatctcagacgcccacggggctttgtatgaccctgacggccttgacattgattacctgctggataagcgggacagcttcggcacggtgacgaatctcttctctgatgtcataacgaaccgggagctgctggaaaaggactgtgatattctcgtgcctgccgcaatctccaatcagataacggctgaaaacgcccatcacattaaagcctcaatcattgtggaggcggcgaacggcccgacaacgatagacgccacgaaaatcctgaatgaaagaggcgtgcttctcgtgccggacattttggcaagtgccggcggcgtgacggtgtcttattttgaatgggtgcaaaataatcaaggcttttactggtctgaggaagaagtcgccggaaaactgcgcagcgtcatggtgaattcgtttgaatccatttatcagacagcgcatacccacaaagtcgatatgcgtttggccgcctatatgacgggcatcagaaagtcggctgaagcggcccggttccgcggctgggtataagtgttatccgcaaagagattttgcatcagttatatagcggatcgcaaaatttctttgcgttttcagattgcagctgacaggttcggacaagcttcgtccgctttcggcaaagattttcctatttttatcacaaattgctatgctggtatgcttcttgcatcttcattaagcgtgagcacacattacaaaatacggggaggaattctaatgacagtttcatacgcacacgaaccatttacaaattttcaggaagagacaaataaacaatcgtttcaggaagcgctggcttatgtgaattcacagctcggcaagcattatccgcttatcatcaacggtgaagcgattgaaacggataaaaagatcatttccgtcaatccggcagataaaaaagaagtgatcggttctgtatcggcagccggaaaagaacttgcggaaaaggccatgcaggctgcgctgcaggcatttcaaacatggaaaaaagtacggccggaacaccgcgcgaatgtgctgtttaaggcggcggcgatcatccgcagaagaaagcacgaattctccgcgtacctggtgaaagaagcggggaaaccgtggaaggaagcggatgcggatacggcggaagcgatcgactttttagagtattacgcccgtcagatgctgaagctgaaagacggttctcctgtaaagagccgtgacggagaatataatcagtatcactatgagccgcttggggtgggaattgtcatttctccattcaacttcccgcttgcgattatggccggaacggcggcagccgccatcgtaacaggcaacacgatactgctgaaaccggcggatgcggcgcctgtcgtggcggcgaaattcgtagaagtgatgaaagaagcgggcctgccggacggcgtgctccaattcataccgggcgacggaggagaaatcggcgactatctcgttgagcatccgaagacgagatttgtgtcgtttacaggctcccgcgcggtcggatgccgcatctatgaacgcgccgcaaaagtacagccgggccaaaagtggctgaaacgggtcattgccgaaatgggagggaaagatacggtgcttgtagacagagatgctgatcttgatcttgccgcttcctcaatcgtgtattccgccttcggattctcaggccaaaaatgttcagccggttcgcgcgcggtcattcatcaggacgtctatgatgaagttgttgaaaaagccgtcgctttaacaaaatcactcaccgtcggaagtccggaagattttgatacatacatggggccagtcatccacgaagcatcttataataaagtcatgagttatatcgaaatcggcaaaacagaaggaaaactcctgacgggaggcgaaggtgatgattcaaaaggatactttattcagccgaccatttttgcggatgttgatgaaaacgcccgcctgatgcaggaggaaattttcgggccggtcgttgcgatctcaaaagcccgtgatttcgaccatatgcttgagattgccaataataccgattacggactgacgggcgctctgttatcgaaaacccgcgcgcacattgaacgcgcccgcgaagattttcacgtgggaaatctatacttcaaccgcggctgtacgggagcgattgtcggataccagccgttcggcggcttcaatatgtcaggaaccgattcaaaagccggaggacctgactatctgattcttcatatgcaggcaaaaacaacgtctgaagcctattaatctttcggaaatagcgcgatgaaaaagagagtcgcgctattttctctatatgagggtaagggggatggaacatgtatcagcagctcagcaaaatgcttccggaggagaaaatagaagccattacgaaatcactggtggcgttaaacagcatcaacggcacattgggagaaggaaaaaaagccgactatatcaaagatatgatcaagagctttccctactttcaggagaatccgtcacatgtgtgggagcaggcgattcctgaggacccttacggccgcaaaaatattttcgcatttattgagggaaacggcgaaagcctgaatacggtcatttatcacgctcatcttgatacggtcggcatcgaggatttcggccctttaaaagatatcgcttttgattccgaccgtctcgcggaatatttctcaaactatgaatttgatcgggatgtgcagcgggacgcccgctcaggcgagtggatgttcggaaggggttcggttgatatgcagagcggtattgccgttcatctcgccaatctgcttcacttttctgaacggcgcgatcagctgccgggccatattctgttcatggcaaacccggatgaagaaagccagcattccggcattttaaccagcatttctgaattaaaacggctgaaacaagaaaagcagcttcgttatttagcagcgattaataacgattttatcacgccgctgtatgagggtgacacgacaaggtacatatacacgggcgcggcagggaagcttttgccttgctttgcgatttacgggcgggaggtgcatgtcggagatacgctgtccggcatcgatccgaatttgatcgcgtcagaaatcaccagaagaattcacaacaatattcatatggcggaaaacattgaaggggagcttgtgcttccgccgacctgcctctaccagcgtgacaataaggaagcgtataacgtgcagaccgccgtcagcagctatgtctattttaattattttatttacgagaaaaccgccaaagaagtcatggatcagctgaccgccgtggctgacgaagcctgcaaagagacagaacaaaaattatctgattattacgacgaatactgtgagagaacgagcctgccgaaaaaagagatgtcatggaacgttcaagtgtacagtctggaagattacctgaaaaggctgagaagccgcgggatagaccctgcacagtgtatcgggcaggcatttaaaacatatgaacatcttgaactgcggatgagatgttttaaagccgtcgaagaactgcaaaaactcgatcctgagcagggagccaaggtcattattttctatgcgccgccttaccttccgcacaattatctgaaggaagaaagcacacgggaccggcttttgcagcatgtcattcaagaagcggtcgataaaacagcggcatcaaccggagaaacattcgtctttaaaaagtttttcccttatttggcggacggaagctttttatcgctgcatgaaacagatgaggaggtctccgcctttaccgataattttccgggctgggatgtcatcgggacgattccttttaatgaaatcagggaattgaatattccgtcggtcaatataggggtatacggaaaggacggccataaatggacggaacgcgtgtacaaaccgtacacattccatgtgctgccggaactcattcagcagacgacaatgcaccttttgcacagctgccgattagacatacgcacaaatggctgacataacggaataagggggatgtatatgcagggagataccaatcaaaatgaattgcagcgcacgatgaagggccggcatttgtttatgatcgccctcggcggcgtgatcgggacggggctttttctgggctccggttttacgatcagtgaagcgggaccgatcggcgcgatattggcttatgtgatcggcggatttttaatgtacctggtgatgctttgtttgggggagctcgcggttgccatgccggtcgcaggatcatttcaggcgtatgccgcaaagtttctcgggccgtcgacgggatttacgatcggatggatgtacgcattcagctgggccaatacagtggggcttgagctgacgtcggcggggattttaatgcagcgatggtttccggccgttccgatttgggtgtggtgcctggtatttggcgtcgtcattttttccattaacgcgctgtctgcgcggagttttgcggaaatggaattttggttttccagcattaaggtcatggccattgtattgtttattattctcggctgcgctgcggtattcggctttgtcggttttaacggcgggcagacggctccgtatctgtcaaactttacgacggacaaagggctttttccgaacggcgcccaagccgtgctgtttacccttgttatggtgaatttttcattccagggtaccgaactggtcggaatcgcctcgggagaaagcgaaaatccggaaaagacgcttccccgctcgatccgaaacgtcatatggcggacgctttttttcttcgtgctggcgatgtttgttctcgtgtccattttgccgtatcaaacggcaggcgtcatcgaaagcccgtttgtggctgtgctggataaaatcggcgttccttatgcggctgatatcatgaactttgtcattctgaccgccatgctgtcggtggcgaattccgggctgtacgcttcgtccagaatgatgtggtccctgtcaaaaactaagatgggccccgcttccttaacgaaactgacgaaaaaaggcgtgcctctgaaagctcttttcatcaccatcgccatctccggtttatccctgctgacaagtgtagtcgcggctgaaacggtgtatgtgtggctcatttccatctccggtatgattaccgtcgtcgcgtggatgtcaatctgcgcttcacaattcgttttccggagacgctttctcgctgaaggaggaaatctgaaggacctggcatttaaaacgcctctttatccgatcgtgccgattctcggattttcggtttacggtcttatcttaatcagtctcatctttatccccgaccagcgtatcggtctgtactgcggtgtcccgctgatgatcatctgttacgcgtattatcacttcggtatcaaaaaacgcctgaagcgtgagccggcttcttcggaaaaaggcgctgccggataagaaaaaaagcccttcgcttaaagcggcgggctttactttgtgtttcgtttggccgacagaacataggatagaacggcacagaactgaaaaccgaaaatgctgacggccatcggccaggcattttcttctccggcaataccgacaaggggagcggcagccgcaccgccgataaagggcaggagtccgagaagagccgcagcgcttcccgcgcctttctcctgtttctgcatagccaaagaaaatcccgtcgtcgtgacgatcccgacagaagaaacaatgatgaataaagaaatgcagactgccgccaggcctaaaccaaacgcaagtgataaaagcaaagcgatgctcccgatgacggcaatcatcagaccggagacaaacagcttccgttcatcatgtgttttggccatccgtccggtgatttgggtggcgcatatgattcccgcaccgtttacggcgaacagcaggctgaacatttgggccgatacgccgtagatgttttgcagtataaacggcgacccggcaatatatgcgaacatgccggtcatcacaaatgcctggctgagcgcaaatcccataaacatccggtcgccaagcaggccgcgaaacgtcatcagcgtctcccggagtccgccgcttgtccgcttttccggcgggagtgattcaggcaacaccgtaagcacggcggcagaaatgatacagccgattaccgccagcacgataaatacgattttccagccggcgaactgaaggataaatccccctgtaatcggcgctaaaatcggcgccgccccattgacgagcatcagtaatgagaaaaaagccgtcaattcttttccggaatacatatcgcgtgcggaagcccgtgcgatgacgattccggccgccccggtgaaaccttgaataaacctcatgacaattaaaaacgaaacagaagggctgaaggcgcataataaagaagacagcgtataaagcagcaatgacagaatcagcggcttccggcgcccgatcatatcactgagcggcccgacaacgatctgcccgacagccagacccaaaagacaaaacgtcaggctcagctgcgcaagtgacgctgtcgtatgaagatcggccgccacttcaggcaaagcgggcagatacatatcgagcgaaagcggcccgaatgaagcgagcgtcccgagaatcagtaccatgccgaggcctgcgcgggcggcctttgaatcagcgttattcatttcatgacccccaccttaacaaatgattctatcactatagcataaccagacggcgtattttatatcatttattgaatataaactaaatattttatttaaaaatctgaatgtaaataaaaaatcagaattagttttcatgtgaaatgtaaaatgaaatataaggatgctaaactataaaacaacaaaagatagaaaagttttacggaagaggtgttcaaagagcatgaacagcaaacaaaccgatcacatcgaaacgaaacgccgatttccggtctgtctcgcgcttgctttgacattaggcgtatttgccgcgggttctgaagagctggtgatttctccgctgcttccggatttagcgcgggctttcagctcggatgtcagtgtgctggcgctttccatcagtatttacggagtgatgatttttatcggggcgccgcttctcgttccgctgggagataaatattcccgggaactcagtctgctggcgggactgcttatatttacggccggcacggtgatctgcgcgctggcgcacaatctctttttcttctttctgggcagggcgctttccgggcttgcggcgggtgcgtttgtgccgacagcatatgcggtggtcggcgaccgtgtgccttatgcgtaccgcggcaaggtgatgggtctgatcgtgtcaagctggtcgctcgctttgattttcggcgttccgatcggctcttttatcggcggcgttttgaattggcggtggacgttttggattttcgccctcatgtctgtcctcgttgcttcgctcattttcattgaggcgcgccgcagcacggcggatgggaataaaacagaagaggaaaacggacggcaggcaggcactttccgggatgcgctgaaggtgccccgtgtccctgtatatctcacgatcactttttgcaacatgatcggtttttacggcatgtattcctttctcggcacatatcttcaccgcgtgctgccgggtgggaatacagcttcagggctgctgatcatggtgtacggaatcggtttttccatgagcgtgttcaccggaaaaatcgcagataaggcggggaaaatgcgctctttgatcgcggcattggccgtgatcagcatatggctttcctgtctcgcctatgcgccgtcatcaatgccgtttttggtcatcgggttattcgtctggggattgatgcaaagcctgacggtgaccttgctcagcactattttaagtgattgctcacagagccgccggggcaaaatcatggcattttacagtctggcgtccaatttggccgtcaccttgggttctgctgtcatgggtccggtctatgtcggatatggatatgcagctgtcggatttatctgtgcggccgtcaccctcatcggctttgtcctcagcgttttcgcatacagaaggtatggaaaatatgagcataagaccgaccaatcattgtatcggtaaaataaagtttctataattttgtaaatgtaaatttttaacaccttatattataaggtgttttctaatatataggaataattatcaatattttcaaataatattgacagcttgaacgtctatggataatatttacttaaaatttaacagattggttggtgctcatgattatattggataatagcattcaaacaaaaagcaaggcttattcaatatctaaactgattacgatcaacacgctcggtcctgaagggacaagcagtgagtacgcagcaaaaaacttcatcaccaatttcacccttctccaaggggtgaacagcaaattatcattgcatgatacatttgaatcgtgcattgaaaaaacgcttcaaagtccgctggaatacacaattgtgcctcacgcgtatgacggcattaagcacttctacatgagaccggatctgcagcttctgcaaattttcaggtgcgacaccccgatgtacggcctggctgtccggcccggttttgaatatacggatgacatgcttgataagactgtcatcgtatcccacccgtctcctatcaatttgattaagtattttacccgtaaagatgtcacgtttgatctggtgaactcaacgagcgcagccgcgaaaagagtgaaggacggtttgtccgacatcgcgctgacaaatgagctggccagacaaaagtacggccttcactttgtcaaaacatttaaaagcattcccatgagctggtcattattcggaaaaggagagattcatgatgaaaactgaacaagatttgcaggaactttatttcccgacgcctaaattaatagaatgggataacggagtaagacaatattcgtccgtcagaggcgatacggaagttctgctttcttacgttccgccgcatacaaacgtggaaccgcatcagcataaggaagtccaaatcggccttgtcgtttccggcgagctgtccatgactgtcggagatgtcacaagaaagatgacagcgctggaatcagcctatatcgcgcctcctaacgtgcctcacggcgcaagaaatgagacggatctagaagtgatcgccattgatattaaacgcctgaaagccggtgaaacctatacaagccctgaggattattttttgaatatttttaaaacgagagacttattgcctgggatggaagtcacgttcttcgtggaagactgggtggaaatcatgcttgccaacattccgggcaacggaggagaaatgccgttccataaacaccgcaatgaacagatcggcatctgcatcggcggtggctatgatatgaccattgaaggctgcaaagtggatatgacattcggtacagcttatttctgcgatccgagagaagatcacggcgccatcaacagatttgaaaaagattcaaaatcagtcaatatctttttccctccgcgctataacagagcaaaagcgaaaaaattagaggcgaaagagtcatgaacctgacggataaaacggtcctcatcacagggggcgcatcaggcatcggttatgccgcggttcaggcgtttctgaatcaagaggcgaatgtggtcgtcgcggatattgatgaggcgcagggagaagcgatgatccggaaagaaaacaatgacaggctgcattttgtgcagacggatattacagatgaaccggcatgtcaaaacgccatccggtcagcggttgacaagttcggcggattggatgtgttaatcaataacgccggcatcgaaattgtcgccccgattcatgagatggagctgagcgattgggacaaagtgctcaacgtcaatctgacgggcatgtttcttatgagcaagcacgcgctcaagtatatgctcaaaagcggcaagggcaatatcattaacacgtgctccgtcggaggagtcgtcgcatggcccgacattcccgcatataacgcctctaaaggcggcgtactgcagctgacgcgttcgatggccgtcgattacgccaaacacaacatccgcgtcaattgcgtgtgcccgggaatcattgacacacctttgaatgaaaagtcgttccttgaaaacaacgaaggcacgcttgaagaaatcaaaaaagaaaaagcgaaagtcaatccgctgctgagactcggcaagcctgaagaaatagcgaacgtcatgctgtttctcgcttcggatttatcaagctatatgaccggaagcgcgatcaccgcagacggtggatacaccgcacaatagagaaggagtgtttacatatggagagaaaaacagtattggttatcgctgaccttgggggatgcccgccgcatatgttttacaaaagcgcagccgaaaaatacaacctcgtcagctttattccgagaccttttgcaattacagcctctcatgcggcattaattgaaaaatactcgattgcggtcattaaagataaagactattttaagagtctggctgattttgagcatcccgattcgatttactgggctcatgaagatcatgacaaacctgaggaagaagtcgtcgaagaaatcgtcaaggtggctgacatgttcgcggttgacgccattacgaccaacaatgaactgtttatcgctccgatggcaaaagcgtgtgaacgtctcggcctgcggggagcgggcgtacaggccgctgaaaatgccagagataaaaacaaaatgagagccgccttcaaccgggccggcgtcaagtctatcaaaaataaacgggtgacgacgctggaagatttccgcgccgcgcttcaggaaatcggaacgccgcttattctgaagcctacatatctggcgagctccatcggcgtgacgctcatcaaagagagggaaacggcagaagcagaatttaacaaagtcaatgaatacctgaagtcgattaacgtaccgaaagcggtcacgtttgaagcgccttttatcgcggaagaatttttgcagggcgagtatgacgactggtacgaaacaagcggttattccgactatatcagcatagaaggcatcatggccgacggggaatacttccctgtggcgattcatgataaaacaccgcaaatcggattcacggagacatcgcatattacgccgtccatcctggatgatgacgcaaagcggaaaattgtcgaagctgccaaaaaggcgaatgaaggactcggcctcgaaaactgcgcgacacatacagaaattaaattaatgaaaaaccgggaagccggactgattgaatcagcggcgcgatttgcgggctggaacatgattccgaatattaaaaaggtcttcggcgtcgacatggcgcagctgttattggatgttctctgtttcggaaaagaagccgatctgccgaaaggattattggagcaggagccatgttatgtcgccgactgccacttgtatcctcagcatttcaaagagaacggccagctgcctgagacagctgtcgatttcgtcattgaaagcattgacattcccgacggcgtcttaaagggagacaccgaactcgtttctttctcggctgccgaggcgggtacatccgtggatctgcggctgttcgaagcgttcaacagcattgcggcgtttgagctgaaaggaagcaattcgggtgacgtggccgaatcaatcaaacaaattcagcagcaggcgaagctgactgcaaagtatgcgttaccggtatgaaacagctgaaaccgaactcgaagtatttgcttttcgggcaggcgctttcgtttatgggagactattgcgttctcccggccctgctcattttgtctacatactatcatgactactgggtgacgtccggcgttatcgcggtccgcagcattccgatggtgtttcagccgtttttaggcgtgctcgtggacaggctcgacagggtgaaaatcatgctgtggacggatgtgatcagaggtgtcatctttttggggctgacatttctcccgaaaggcgaatatccgctgctttttctggcgctgctgtttgtctcgtacggaagcggcgtgttttttaacccggcacgtctcgcggtcatgtcgtctttagaagcggatattaaaaatatcaacactttgtttgcaaaagccacgacgatttcgattattgtcggcgctgcagccggcggactttttctgttaggcggttctgtggagcttgccgtcgcgtttaacggggtgacctatcttgtctccgcgtttttcatcagccgcattaagcttcaatacgtgccgattcagtcagaaaacgtaagagaagcttttcagtcgtttaaagaaggcctgaaggaaatcaaaacaaatgcttttgtgttaaacgccatgttcacgatgattacgatggcgcttttgtggggtgtcgtctacagctatttcccgattgtcagccgctttttaggcgacggggaaatcggcaatttcatcctgacgttctgtatcggcttcggcggctttatcggcgccgctcttgtcagcaaatggggctttaacaacaataaagggctgatgtattttacagtgttatcgatcgtctcgcttgcgctgtttttgtttaccccgattttcgccgtgtcagtcattgccgccattcttttctttatcgcaatggaatacggtgaagtgctggcaaaggtcaaagttcaggagaacgctgcgaaccagattcagggccggatcttttcggtggcggaggcgtccatcggattgtgcatcgccgccggttccatgctgatcaacattgtagacgcggcagtcatcatggcgtttatcgtccttttggtcagcgggctgtttctgcatacaaaactggtcaataaatccttttcagaacggaataacgaatcagagcaaatccatttataaggagccttccagatggaaatcataccgtccgatgtcatcaagacacttccgaaacaggaattttcgctcgtttttcaaaaggtaaaagagatggagaaaacgggagcccagattattaatctcggccaggggaatcccgatctccccactccgccgcatatcgttgaagcattgcgggaagctgcgctgaatccttcatatcacggatacggccctttcagaggctatccgtttctgaaagaagccatcgcggaattttatgagagagagtacggggtatcggtcaatccggagacagaagtcgcgctgttcggcggagggaaagcaggtttgtacgttttgacgcaatgcctgctgaaccccggcgatatcgccttagtcccgaaccccggctaccctgagtatttatcgggaatcacaatggccagagcggagctgcatgagatgccgcttcatccggaaaacggctatctgccggattttgagcggattgatcccgccgtcctgaaaaaagccaagctgatgtttttgaattacccgaataacccgacgggcgcgactgcggatcaggcgttttatgaaaaagcggctgcgtttgcaaaaaaatatgacatccatcttattcacgattttgcatacggcgcgttcgaatttgatcagaacccggccagctttcttcaggcgaaagaagcgaaaacggtcggcgcggagctttattcattttcgaaaaccttcaatatggcaggctggagaatggcatttgccgtggggaatgagaaaatcattcaggcggtcaatgagtttcaggatcacgtcttcgtcggcatgttcggcggccttcagcaggcggcagcggcggcgctgtcaggaaatcctgagcatacggagcgtctgaagcgcacatataaagaacggattgattttttcacggcgttatgtgaaaaggaattaggctggagcattgaaaaaccgaaagggactttttatgtctgggctgaaattccgaatgaattcgagtcttcacaccagttttcggactatctgctggagcatgcccatgttgtcgtgacgcccggcgagattttcggcagcggcggaaagcgttatgtcagaatatcaatggtggcaaaacagggcgatttaagggaattcgtgctgcggattcaaaagctaggtttgtcctttccttcattacaagaaacatcccgctgagagcgggatgtttttattatatgcttttcatgctgccgccgtcggctgacacttgctgtccggtaatataggaggcttcttcagaggcaagaaaggcagccagcgccgcggtttcttccgcagttccgacacgcttcatcgggacgcctgaggcaatccgttcctccgcttccgctttagaaatgccgttttgcttcatgacattctttacgaattggtgataacggtctgtggcgataaatccgggattcagacagttgacagtaatgtgaaaaggcgcaagctgaatggcgatgtttttgctggcattaattaaagcggcgttcatcatgctgttggtaaacatattggcgccgggttctttccataggtttccgacgatattaatgattctgccgaattcgtgctgtttcatgatcgctgcggccgttttcatagagtcgatataggcgatcgttttattcgtaaaggtatttgtcatatcctctatatcgcagctttcaaaggtatccggcgagccgcccggaatgttgttgatcaatacatcaagccgtccgcattgtgatctgatctcttcaaaaatgccggctctcgccttctggtccgacatatcgccggccagaacggtgacgcccgcatccggatgtttggcgaggatctcttcttttaccgattcgatattttcgggaactcgtgaattaatgacggtatgaaagccattgtccgccagtttcagagcgatcgctttgccgatcccctggctggctcccataataaatgcggttcgttttgacaactgtctgcacccctttaccaaaatggaatctcctttacatcgtaaaaaaaaatgataaaaatagcaaattttatttaaattctgacaaagaaaaaacccgccggacaggcgggtgggtgttacacgtgcaaaaacttcggaagcgtgtcaagagacaagcggtttccgacaaaaaatgaaccgaattctccgtagcgcgcgctgacttcatcaaagcgcatttcataaacaagttttttgaactgaagcacatcatcgctgaagagcgtgacgccccattcgtaatcgtcaaaaccgacagaccccgtgataatctgtttgactttgccggcatagctccgtccgatcaagccgtggcttctcatcaggtttctgcgttcatccatagaaagcatgtaccagttgtcgttgccgcttcttcttttatccatcggatagaagcagacgtatttcgcttccggcagctcaggatacaggcgtgcgcggacatgcgggttttcatacggatcgccttctccgcttgcgaggtagttgctcagctcaaccacggacacgtaagagtaagccgggatcgtaaattcagcaagctttgatttgttaaattcaagctcgatttcgttcagctcttccattgtcgggcgaagaatcatcagcatgaaatcagctttctgtccgacgatgctgtagatggtttgcgagcctttgccttctttttgggcgacgccccatttttcaagcagtcccgtaaattcgtgaataatcgacaggcgctcatcgctggataacatcttccatgacgtccagtccattgtgcggaaatcgtgaagcgcgtaccagccgtcaagtgtttgggcggcttcgttcgttttttgctgctcactcatgtatcttcactcctatatcttttcattacattgatgccttcactatatcacagtttaaccgtttcggctgtggagaaaccttgaataatccgaagccttgtgtcagaaactaagccgtgaaacaaaccgtcaattaaattagttagaaaaataagatttctttttgaaagcgctataatagaagttggttatttgaatttagctggaagaagagtatgctgtaaaagtaagcgttttttgtcaacatagaggagggaatatcgtggcagatttatttacaaaagtacaagaaaaagtcgcaggaaaagatgtgaaaatcgtatttcctgaagggttggacgaacgtatcctggttgcggtcaacaacttggcgggcaacaaggtattaaagccgatcgtagtcggcaataaagaagacattcaagcaaaagcgaaagaattaaatcttacgcttgacggcgtggacatttttgacccgcatacatatgaaggcatggaagaactcgttcaggctttcgtagaacgccgcaaaggcaaagcgacggaagaacaggcccgcaaagctttgctggacgaaaactatttcggcacgatgcttgtgtacaaaggtctcgcggacggacttgtcagcggagccgcacattctacagccgatacggtgcgccctgcactgcaaatcatcaaaacaaaagaaggcgtgaaaaaaacatcaggcgtcttcatcatggcccgcggtgacgagcagtatgtgttcgctgattgcgcgatcaacattgctcctgacagccaggaccttgccgaaatcgccattgaaagcgccaatacggctcaaatgtttgacattgacccgcgcgttgccatgctcagcttctctacaaaaggatcggcgaaatcagacgagacggacaaagtggctgaagccgtgaaaattgcgaaggaaaaagcgcctgagcttacgcttgacggcgaattccaattcgacgctgcatttgtgccgtctgtcgcggagaaaaaagcgccggactccgacattaaaggagacgcgaatgtatttgtattcccaagccttgaagcaggaaacatcggctacaaaatcgctcagcgcttaggcggctttgaagcggtcggaccgattctgcaaggattgaatatgcctgtaaacgatctttccagaggatgtaatgcggaagacgtctacaatcttgcgttaattacggctgctcaagcgctgtaatccgcaaaagccggtctttacgaggaccggctttttttatagaaagaatgtcactgcggcccagccgaacagggacaaacagagagaaccgatcaagcctgctgcgagcgcccgccagccgctatgacgaaacgccgatatatggactttcaaaccgagacccgccatcgccatgccgattaaaacataagacacttgaacaagaaacgcggaaaacgaagctgaaataacgcctgatgtatggatggcgctcattccgagaaatccgaagataaaccaagggatggggagcgaagcggcagaagccgtctttgactttccgctgcggcgcgcccgcattccgagcatgaatgcggccgggacgagcagcgcgacccgggtcagtttgacgatcaccgccatctcgacggctgcttttcctccggcgctgccggccgccgccgcatgcgccacttcgtgaagcgttgccccgcaaaaggccccgtaagccgcaggagaaaaccccaatccatgataagcaagagaatatacaacagtaaaaacggttcctaataacgaaacggcggccgcgctgatggcggctgcattttcatttgatctgatctgcggcgcgatcgcggcaatggcagccgccccgcagatcgctgtgccgcaggctgtcagcgtgctgagtgtctgatctatacggaacagccgggacagtccgtatacaacggcacccgcaaacatcatacagcagacggcaattgcaaatacgtgccagcccgcatgatagatatccgccagattcagtctcatgccaagcaggatgatgcctgctttcagcaagtatttgcttgagaacgcgatccccggctctaatgccgcccgctgtccgaatacggcgcgccagagcatgccgatcagcatggcaaggacaagcattccgagcatatgcaaaaacggcaggcggctgacatagaaagccgcaaacgcaattcctgcggtaactgaaataccctttatcatcttcatctcagtcacttcccattatcttgataactccactttactgcggtcttaatcattagtaaaatatatttatatgatctaaacgattaggaaaaataatgattaggggcgatgctttttgtattacggggaactgaaaacattcattgccgtcgtggaagaaaaaaactttacaaaggcggcgcagaagctgatgatttctcagccaagcgtcagccttcacattaaaaacctggagaaagaatttcaaaccgctttgctgaaccgctctccgaagcactttacgacgacgccgacgggggacattctctatcagcgcgccaagcagatggtctttttgtacgaacaggcgaaatctgaaatttacgcccaccatcattatgtcaaagggaagctcaaaatcgccgcgagctttaccatcggcgaatatattctgccgccgcttctcgcaaagcttcatgacgagtatcccgagctgaacctggacgtcatgatcggaaacacggaggaggtcagcgaagcggttcggatgcttcaagccgatatcggattaattgaagggcatacggggaaaaacgagctcgacattcagccgtttatggaggatgaattgtgcattgccgcaccgaacggacacccgctcgccggcagaaaaaacatcccggctgccgaattgcaaaatcaagcgtgggtgacaagggagaagggttcgggaacgagggaatatttagaccacgtccttcaatcaaacggactgcggccgaaatccatgatgacgatcagcagcaaccagggtgtcaaggaagccgtgatcagcggaatgggtctttccgttctgtcaaaaagcgtgctgcaaaaggatctgcttcacggcagcatttccgtgcttgagataaaaggattctccttaaaacggaaactgtctatcatccaatcttccattatggagaacacaaaaaacaaagaaatcttcatcgctcttttgaaaagccaatttcaatcatctcaagcggagtgatataataaacgcatggaaagcttatgacgaaagggatttaatatagatgggaaagcaaccgattgatttactgatgcagccgagctggagaatcattgaccaatccagccttggcccttattttgatgcgaagcagtcattcgcaatggatgatacgctgtgcgcctccgtaggcaaaggggaatcgcctgcgacggcacgcacttgggtgcaccaccggacgatcgtgctcggcattcaggacacacgcctgccgtttttagaggacggcgtgaaattgctggagggcgaaggctaccgtgtcattgtccgcaattccgggggcctcgcggtcgttctcgatgaaggcgtattgaatatttctcttatttttgaagatgagaaaaaaggcatcgacattgacagaggctacgaggcgatgacagagctggtgcggcggatgctgtgtccgtacaatgccgaaattgaagcatatgaaattaaaggatcgtactgtccgggcagctatgatctcagcatcggcggccgaaaattcgcgggaatctcacaaagacgcctgcggggcggaaccgcggttcagatttacctctgtgccgataaaagcggaagcgaacgcgccgatctgatcagacgtttctatcaagccgctttaaaagacaaaagcaacgatacaaaaggcgtatatcccgatatccggcccgaaacgatggcttcattaagcgaattgctgcaaacggacattaccgtgcaggacttaatgctggcgcttttgactgaactgaaggaactcagcggacgcctgtatgcagccggattatcgccggaagaggaaatggtatttgaaaaaaatctgatccgaatgctggaacggaatgagaaggtgttcggcacgcaggaaagcttggactgagtccgggcttttttatttttggtaattatatactattcagttatagtgaaaaagaatcgttatatcaaaactagtttacattatataccttatttgattaatatatttatgtaggttccaaataattctataaactgaaggagatggagatatgaactttaaaaaaataaaagaagaaaaaagaatcacgatccctacacatttgttagccggagatgcggaacaatcaggcaattctttcgcttggagcggctgggtgcttgtagtgccgagccaagaagacaatcaaaacccgaatttgaatttctctgatttagccgctcaaaagtaagataatgactgtttggagcctacgcattcgagacgaggcggtgagagtgtgacacaagagtatataagagaaattaagcggggagcactgtcatggattgttgaaaatatccattattttgatatgaaacataaagtagcgaatgatttcagatggcgccttaaaacatttatagaactcatttttcttaccaattacctgatcagaaatcaggcagatgataaggaagttgctgttttaacggagtttattacagaaaggctccgtaatgatcagcttgaagaatttattcattttgatccggacggtctcgccggattggctattgcgggtgaatttcttaccttgactgatcatccgtcacaagcttcagtgatatgggagctggaaaaattcacggcagcgcgttttgattgcagccttgctaaaattccctttcgaaaaatggatctgaagtacagtctgcaaagagcaggcgtaacctcggaaataacggatttttctgacttatatcactacacagcagctggtcaggatatcccaaatacatatatgacggatcatgatgcatacagtatcactcatacgattttttatataacagacatgggatgttcttctcttacggataaagagtatcatctgtcgtccttaaaagaaaaggtcctgaaatttctcgggatctatatctgtcttgagaatttagatattaccagtgaattattgatgtgcagctcttttttacatatcgacatggataaggacaaccataaaccgctctatgaagcagcctggaataaaatctatcggggccaaatgaaagaggggaatgtcccgagcatcacctatcaacataaacccggtttgaaaggtgaacagcgaagagaagatgtgtttaaacattgctatcatacaacacttgtcgccgcgggtgccgcgcatgcctgccttagagcagaaaggaacgattaacttgaacagattagctgaagagacggatcaatttttattatcttttgctgaacaatcgcttccggatcaaaagagcattcagctgtttgccggcttctgcaaatactacagaaagacgagccattcttccgctgtaaaagaacatactgaaaggattgcctccgctttcgttgataagtcatgctgggaagatctgtttcactgtaacacggccattgtcaatgagttgattcatatctatttaacggcaaaagcttataaaaagaagcagggaatggattcggatgatcaagtcatacgtcacggattgcaaaacggctatcttataaaaaaagaatggccttattttaaatacgccgaattcgccggtttgctgaacgagctgggaatgtcaactgaccatgaaaaagtgcgcttttacaagaattcgatatttcagcctttgctccatgacgcatggaaaagaacagctgaaaacgagctggagtttgtcgagtactgtcttcttcatttagatcagggagagcatctgcttcatcccggcttgaaggcgtccattcaaaaatggcttgtgttttgtctcggcagccgaaaaatgaaacagctgtgcaatatgttatttatccaatcgtgtatcgatccatttttttatggctgtcaagcggctcttcatcatataaataacgagaatccatccattcattgtgctccggctcttctgccggcgattgagattctgaatctggagtgtggaacatgcggatagtcaaggaacattttaatataaaaaaaacagaagaatggctgctgggtttttggaagaacattcagctgcagccggaagaaatggaagcagatgatctcatgcacctgttttgcggtttagcggcatgtcatcactttgaaaaaagaaaggatacagaagaagtcattctattcttagaccgttattttggagaaaaaacgcacgaatgccatccggtcctgttcgcgtatgcgtatcatatataccgcaggatgaatgccgcaaaaagcatcttttttcataacggacttgaacaaatggtccgcggtttacaagaggaactgaaatcagagccttcctctatgatcctcatggtgttagcagcttattttggggcggtgaccccggaagaactgatcgttttcttagaaaccgcaatgaaacgtgaggccgatttgctcatggcaccgggcagcatccaggaagagcaggcagatgccctttatgccgtctcttatttgcaaatgaaaaaattgcagccttttctcacggaatggtacaaaacatcagactttgctttttcaggtttaatgttagccgagtgcagaaagtatcacattgacgccgttgcaaaatacacagccattatgaaatttctccgattcgatgaggcgctttttatacgggaagggcgggaatttctacgctttcagcagcgaagcagcggaagcttcggttatttaaatccattagcgatggaccaaggggcggtcagcggcaaattgctggaccgtcaatatttcctgccgtccgctcattatgccgccgcctctctgtctatgctgtaatgtctctcttttgaaagacggaaaaagaaatcaataaacaaataagaaagtagatcgctataaccgtcacggaataggggatgtttaacgttgaaatcgcatcacccgcacttttatttacataagcaacgaggtttaaatgcggaaagagtgtaaatttataccatgtaaattgggcaagcaaatcagttccgcccaatatactgccggcaaacagcagtaaaatggataagcaaagggagagcgcctggcttttgcacaatactgacaaagtgaacgcaatggtgacaatacttataattgatatgaaacgcaaaagcagaatgattccggatgctttgattgaactgatggtatacagactgtcatttaaatgagtatagacgagcggatatgaagcattggaaaaaccgaataacacgccgccgatcagcaaacagctcacacagtaaaataagtaaaccatgccggtaaacagaagagaggccagaaatttcgatgttaaaatccgccatcttcggttcgggcttgtagcgataaacttaatcgtcccaagggcaaactctttagaaacaaccccgctgacggttaaaatcgcagtcaagcttacgaaaatctcaagcccgtttgaagtaaccgtgccgaaaaacctccagccgttccattcataagggttgatgttatgctccaaataatagtctttattcttaacatcagcagaataataaacgcctgccgtttcagccggtttattaatttcttcctgttttttttcggcgagaagccgttctttccaattgttatccgaggaagcatctaactcatgattcataataaggccggccagcaaaacgatgagaaacaggaaaaaaagagataaaagtgtgcctttttttcgggttatttttatgaattcgttctgcgtcagatgaaatatgctcataccgcgtcctcctgatctgtaatcatcatgtatttctcttccaatgacaaagtccttgcagaaacgcgggaaatcagaatctctttctctgccaaagttttaatgatatacgggatggtatcttcctccgcttccaattcaatgatgcggctgtctttttgctgtacttgaagaataccgtcctgctctaatatttctttcgcccttgccggatgatcgaccgtgacggtaaacagctttttctgaccaaggtcatttctgctcttcatgtcttcaattcctaaaatccgtccctttttaatgtaggcaaccctgtcgcaaatctcctccatttctgacaataaatggcttgataataaaatggaaaccccttgcttcgctaaatcggaaagaatgatgcgcaattctttcatacctttaggatcgagaccgttcatcggttcatccagaattaataacccgggattgtgaagaagagaataagcgagccccaagcgctgtttcatgcctaatgagaaatgtttcacttttttgcgggcagcctgctccagtccgacttttgcaagggtattcataaggtcatccgttcgcagcgaggtgctgcgcagtttagtaaaatattttaggttttgcaaagcggtcatattcggatacatatccgggccttcaatgataaccccgatatgtctcataaaatattcaaagtcgctgtccggtctgcctctgaatgaaatggctccttctgtttttttaataagctgtacgatcattctgaaaatagtggttttacctgagccgttcggccctaaaaggccgaatatctcgccttttctcacatcgaaagaaattgactgtacaataggggtatgattgatggttttagagacatcttttaatatcagggctggttcactcatgctacttgcacaccttccttatgatttagggtaaaagccgtcaaaaccgaagaacatgcttccgatcaggccggcagcgattaaaatgagagcaatgctataccacatttttcgattcaatggtttccctccttacaatgctgacattccatttgaaatagcgcaaaaagatgcggaatatcagtttcgaaagatcaaatccggccataaacaccgccatacccgctccgaggaccatacatccgttaaaaatggctgttacaatcggcacttttatgaggagaaagaatgatccggtcatcagcatcaggccgattgccatcaaacttaacaccgcaacagaggcaaaaagaaacggtgtcagcataaacatgaagttgaacatgcccatacccagcatcaggccgaatgctttgaaaaaggagcgccatgttttctgctcctcggcatcactgatgaaaatatccgcttttaaggcgcgcgcaagtgttttggggtttcctaaattgccggcgatttgttcatcgctttttccttcagcgacgcccatttggaatatttcgccgatatcggcgagtatctctttttgctcaaattccggcagatcttttatttcccgccggagatgttttaaatattggtctttacacattcattttccctccttaatgatgctgttcactttttcggacaggtcaagccattccgattttaatgtgtgatgataaaaggcgccttcttctgttactttgtaatatttgcgtgacgggccttgatctgaagctgctgtatacgtttttaaatagttatttttcgtaagtcttcgtaatatggggtagatggtgccctccgatacagggaacgtttcacttatgaccttgattaattcataaccatataaatcttcataaagaagcagggacaacacacaaagttccaatgctccttttcgtaattggctactcatttactatcattcccatcatatctaataattgtattctctatacagtgtattgcacagtagctaatcgatcaataattcccaagaaccatttgggatgaggaattgaatctttatgcttatgtgcgggcggggaccgagatgcgcagcccttgcgggaagaaggcctcctgaacaatgtttacattaatatagatcaggatgcgcgtcattgacaaatggcaaaaacccctttttccatgacaagaaaaggggttttttgcgttattcggccattttttctaaattgccgttccggtccattttaaaggacggagacgcatgctcgtcgtcttcaaataaaactagttttctggctctgttcataattttcaccaaggtttcgtagtcttcctgaatggttttttgatctttttcaagtttttcgacggccgcttccagctgctcggttttagactgaagttcttggttttcccgttttaaacggtcattttccatctgcagggcggaagtttgctttccgctgccttcatagctctgcagaaattgaatgacgtctgccattgtgagctccgccttttggctcggctgctgaggcgccagcaaatgtgataaactagctaactcttccttgaagctttcatcgacataaggcatatgttcgccggacatgacggcttgccgatcctcttttggcgcttccgtttgaaccgtctcttcggctgcggtttcttgaatgatgtccgcatccggtgcaggcggctggtataatagtttcttcttggccggctggccgtttccgagcgcgcgcatccgctgtttccgctgtttttttgcaagctgaagcgctttttcatattgatggcgcacgacggcattccatctgaatccgcacgctgccgacgttctgtttaatttatcgcctacctcttcaaaggcgttcagctgcgtgcttccttcccggacgtgccggagcacggtttccgcaagcagcaggtcattttcctccgaccaggcgtcctgtctttgctttgtcaatgttctcaacccccaataatctttgatggtattagaatgtccagattggaaaatatttatacaaattggctgaaagaatgagagatacgcagagccttgcaggataagatgaatccttgtacaataaaacgtgatgtgatttttttcgtttttaaaatttaagatttaacatagaggaacattgaatgaagggaagcgtacatcatggctaatgaattccgagtgtgtgatgattgccaggccaccaatattaagacattgctgccgcgtttgaaagaagctgacccggatgcaaaagtggaggtcggatgtcagtcatattgcgggcccggacgcaagaaatcgtttgctttcgtaaacaaccgcccgctgtcggcgccgactgaggacgagctgattgagaaagtgaaaaagaagatcaaaaagtaaatgtgcatttttacgacagcctcgcccgatgggtcaggcttttttgcttcaaaaaatcaatgattgaaaactggaacaaaacgccggacaaattcaaggatgttttcaaattacagagccgatataatagaatcacggctaaaaaaaagagggaatgacgatggcgtatccaaacggaaaattatcagaagaaaaagtgtttaaagatcccgttcaccgctatgttcatgtgcgggacaagctgatctgggatttgatcggcacccgtgaatttcagcggctgcgccggatcaaacagctcggtacgacgtatttgacgtttcacggcgcggaacacagccgttttaaccattctctcggcgtctatgagattgtcagacgaatggttgatgatgtttttaaagggcgtcctgaatgggatgacaatgaacgcgaactctgtctcagcgccgcgcttttgcacgatttgggacatgggccgttttcgcattcctttgaaaaggtttttcatctggatcatgaagactatacgagggaaatcattctcggcgacaccgaggtgaatcaggttctcagaaaggcgggaccgggatttccgcaggatgttgccgaagtcattgccaaaacatacaaaaacaaacaggtggtcagcctgatttcgagccagattgacgccgacaggatggattaccttcagcgggacgcatactatacgggcgtcagctacggacattttgatatggaacggattttaagggtcatgcgtccgcgagaggaccagatcgtcattaagcaaagcggcatgcacgccgtcgaagactatattatgagccgctatcaaatgtactggcaggtgtattttcatcccgtgacgagaagcgctgaagtcattttgacgaaaattctccaccgtgcgaagcagctccatgaagaagggtatatattcactcatgctcccgttcatttttattccatttttgaagggaagctgacgcttgcggattatctgaagcttgatgaagccatcattttatattatttccaggcttgggaggaagaagaggacccgattctgtccgacttgtgccgccgcttcattaaccgccagctgtttcaatatgccgaatttaatccgaatgaggaaatgtcggcttattttgaactgaccgctctctttaaagaggcgggaattgatcccaattactatttagtggtcgattcttcatcggatctgccgtatgatttttaccggccgggtgaagaggaggagcgtctgccgattcatctgttaacgcagaacggccagatcaaagagctgtccaggcagtccgccattgtcgaatccatttcgggcaaacgccggacggaccataagctctactatccgatggacctcatttgcgacgattcagaaaaccctgaagcaaaattaaaaatccggcagctgctgggactgacatagaaggattttggtaaagaaggaaaaggagatgtcgggaatttgttgaaagaacatgcaaaactgatgaaggtgttctcggattctggagaaatcatcgggcggaaaaagctgcagaaaatcatttatatcgcgaagaaaatgcagtatcctttctacgaaaaatatgattttcatttttacggcccgtattccgaagaactgacgcttcgaattgaagagctgtgcaatcttgggtttctggatgaggtgaaggaaaaaaagggcggctactttcaataccggtactcgctgacggagacgggagccgagtttttacatcatgcggagcttaagatgccggatatgaagaagtacatcgacagcgtcaacagccgctcatcccggtttctggagctggtgtctacgattttgtattttgacggccttgaagctgaggaaaagaaagagaaagtgtttacgataaaaagcaaacagaaatatacggatgaagaatatgatgaggcgcttcactacatagaagagctgaaacacatttgttaaaggcgatgctttcgtctttttttatgaaaaaaccaggccgcgatgaagcgggcctggttttgtttattgtctcaatttgctgtgcttgtacgaatataaaaagtaaacgatgacgccgatgatcagccagacggcaaaataaagccacgttttcagcggcagattgaccattaaaaacaaacagcagataatggccaaaatcggcagtacgggtacaaaaggcactttaaatccccgtggcagatccttatgggtgcggcgcagaatcagtacggacagactgaccatggcaaatgtcaatagcgcgccgatgtttgagagatccgacagctctttcagatcaacaaaacccgcgatgcatgcgctgatcagtccgatcagccacgtattaaagatcggcgctcccgatttctttccgacaatggtaaagactttcggcagcattccgtctcttgccatcgcaaaagatatacgggtcgccgcataggtatgagcaagaacgacggccatcagtccgatcaccgcaccggcagcgataatgcccgccaccgcgttttgtccgacagtctgcagcacataagacatggcttccggcacattaagctgtgaatacggaaccatacccgtcatgacgagacagacgatgacgtataccaatgtacagatcaccagtgaaccgataataccgatcggcaggttgcgctgcggttttttgacttcttcagccgaagccgaaatcgcgtcaaacccgagaaacgcaaaaaagacggcagaagcccccgtaatgacgcctttaattccaaaaggcataaaaggatgccaattgcccggctttacaaaaaagcttcctgtgatgataaacagcaaaacaattccgatttttacgagaaccattatattattaaaggttttgctctctttagagccgcgtgacagaacgacggcaattaatagagtaatgatgatggcaggaaggttgacgatccccccctggctcggcacgtgcagcagactgtccggcaaaggcatgccgatttcggctaacagattattaaaataacttgaccagccgcttgccaccgctgacgccgtcaccatataaacggataagagcgtccagcccattaaatggccgacaatttctcccatggtggtataagagtaaatataggcgcttccgtaaaccgggagaacagaagcgatttcggcgtaacataatgctgcaaggctgcagacaacggctgcaatgataaaagaaaagattacggaaggcccggcgtttttcgcggctgtaatgcctgtaagaaccatgacgcccgtcccgatgacggcgccgatgcccagtaatgttaaatcaaatccacccatcgttttggcagtctgcctttttctgctttgttcaagcagctgggtgatgtcttttttttgtaggatattccgcaacacgcatccctccatccaaaagcaaaagccaagagggactctttggcttttacccgtgtcacatcttctgtgtaatcgacaatcctgtgttctgtttccccgtctgttccgtttcttttcttttccaatcatattgtctgccgcatccgatcagattatccttaccgtcaaacgcagtcacccttaatgattttacctgaatcgtgtctataaaaccagcattgcataaaaggatatggtaaaaaagagggagacaaaagtctgtgcagggcaggataaaagttgcgggcattccggccggaattttgactttctccgtaaggtatcagtaaaatgtaataaaaaacaaacaaatgatgatggatgcatcttgaaatggggagtttctgcatgaagcacgataacttgcaagcaaatgtactggattacgcgctcacgaaatatttaaagagcacgaaaaagcttgatgaggcgacaattccaaagagtataaacaatatcagaggatttattctgaggattatttaccggcacggcacgtgcacgattaaagatatattgcaggaggtcacattatcgccttccgccacgacaaccgctctcaatcatttagaaaaagaaggattcgtggaaaggtcgagaaacaatgaagaccgccgcacggtatggatgacgctttccgaatcgggaaaaatggcggccatgcaaatgattgaaaaccggcagctgctcattgacgaactgttcgaagcattgacagaggaagaaaagaaaatctttttcagcctggttgaaaaggttgtgaaataagccggcctgacatagcagcgccggccattatcaaggattactccgtatcgctgatccgtttgccggcgacggcgtaatgatcctttctcatttcttcaatcatgacaatgatcttttcttcggctgcgccagtcgtttcttttacggcttcggtcactttttcaaccagattccgtttttgttcatctgtgcggccttcaagcattttaacggttacgagcggcatggtgctgatcctcctttatcgtttcctctctttggaagagagatcacttatagtatactgaatgaaggacaatcttgcatttttaaaaaaaggggattttgacatttggacagatttttatattatccgctggagcttatgccctatgtcgtgattacgctgatcgtggcatttacgatgcatgaactggcgcacgcgtatgtcgcgtatcggttcggagacgataccgcggcgagacagggcagattaacgctcaatccgattaaacatcttgatgttttcggaacgattctaattttggtcgcgggtttcggctgggcccgtccggtgccggtgaaccgccgcgcctttaaaagaccgcggctggcgggagtgctagtttccgtcgccgggcccgtaagcaacctgcttcttgcctttatcggtttctttttgctagtgttgatgcatgcttacggaatggagctgctttctgcattcagcatggggcttgaccgctttttctctatttggattcagctgaatctcgcgctgtgtttattcaacctgctgccgcttcctccgcttgacggctaccggattattgaggatctcgtgccgccgcgggtgcgcgccaaaatgactcagtttgagagctacgggattatcgtgtttctcgtgctgtttgtgacaccggtcggctcctatgtcgtgtggccgctgttaagcgaggggagagactggattctcaaggtatttgccattatatttcaaccgcttttgtaggagggtattttcatggaagaaaaaaagaagaaaacaatcggatttaatattattaaaagtgatccgaccgacggacatggcggttttggcgccgggtcgctgagccttgacaatatttctccggtatttgtcgatgtggaagagaaggaagctttcgtagacatcggcgcaatgcatgcccgcagtgtcgttgaaaaaggcatcaaattcctgccgaacaaagatgaagtgccgaacggaaaaccgtactggctcgtgtgggtcaccatcgacagaaaaaaagaaggcccttattacgcgggtgtgacggcttgtgaaatgaccgtggacagaagtatccgcagaggctataagtcattgccggagcatgtgaatttaatggataaatcaatgaagcgccgcattatcgtggacaaaatggacgccagctcaaagcaggtgcttgctgaatttctgcagaagcatgaccaagggctctgggaacgttcatccgatgaattgaaaacaggtctgcttccgggcgaaaaataatttgtgaactttttgtgaactttataaatatttgcactatttcgcaattgtactgagtaaactgttgatacagaatcaggacatggaaagtcccgagccgaaccaagactcggggtttttcatgtttacgcggaggtttcatcatgttcaccgtctttgacatcgggccttggatcattgaagcagatacggcggaaacgagaaaacaatatgaaaaatcatgggctgatccctgcgattgcgggagctgccggaacttttccgaggcggtgaatctccttcccgccgagaaaacaagattgtttacgcagtttgggattcgtccggctgtctgtcacgatttgggggagcatggaaaggaaaacggcctgcatcattatgcgggcagctatccgattgtcggcatgcttagggaaggctggccgaagtttcacattgagagagcgggagatatccgcttttcgttttctttgcctagtacaacattttttataccgaagggttttcctgaccctattatccatctcgacttttcactcttgctcccatgggtgcttgaggaagacgcggattaagcccggcgcgcaatgcaccgggctcagtcttttttgccgagccacttatcccaccactttttgcgcggagcttctttacgggcggggacgtgttccttttcttttttagacggttccggtccgtagcacacatccgcgggctcagtgcctgcgatgaaatacgtgtaatgctttgcggcgcatccgggtcccgaagtgtagccggaagcggggtcaatatagacgcccgtgacgcccttcggcggtttaagcgctatttccggttctccttcgagcgccttctccataaagtccgcccaaatcgtcttcgcatagcttttttcttctactgaatcaatcgtgctgcttttgtcatagcctgtccacacaccggcggcaagagcccgattaaagccgatcatccagctgtctgcgctggtcgtgcctgatttcccgccgtacgtccgggtcagccggtctgaaatggtgcgtcccgtgacggaagtatagccgtttaaatcctcatcaaacatgcccgtcatcatgctcgccgtcacaaaagcggcttttttatcaagcgtctgctgatgtccgcgcggctgttcatacaagaccttgccggcggtatccgtcacttttgtgataaaggaaggggtgatttgttttcccccgtttgcgagcatcgcataggcattaaccatctcaatcgggcgcacgggttcagttccgagcgccagagacggaaggggctttaaatgttcgctgatgccgaattcctttgccgccgacacgagcttattcatgccgagaaagagatgggtcttcacggcataaatgttgtctgataacgcaagcgcctgaagcagcgtaatcggtttattggcgtagtagccgttgtaattgcttggagaataggtatctccgttgtcgtcaatctggaactctgtggcttcgcttttcatcagcgtgaccggtgtaaagccgctttgaatcgctttgtaatacaaaagcggcttgatcgtggaagccggctgccgtttcgcctgtgtcgcccggtcaaacgggcttttttcgtagtcacgtccgccgagaagcgcaagcacgcgccctgttgccggatcaatcgcggaaaagccgacctgaatgtcagagccggtacggatcgtatgtgccacagtgttttccgcgatccgctgcatgcgcttatcaagcgttgtataaacacgcaatccgctcgttgcgagctgttcgcgcgtcatgccgagctttttctcgagttctttcatcgcatcatcgtaaaaataaggcgccgttttcgccgcggttctgcttttcagcggctgataggcaagcggcgttttcttaatcctttccgccttttcttttgagatcattttttgtccggccatcagacggagaatggtttcctggcgctgtttggccttcttttcactgacatatggcgaatagccggacgggcctttcggtatgcccgccagaagcacggcttccgcatcgttcagatctttggcgtgtttgccgaaatacaggcgggaggcggcttcaattccgtatgcgccgtggccgtaatatatcgtatttacataaccttctaaaatctcgtttttggaatagttctgttcaaggcggatcgtgtaaaatgcttcgttccattttcgtttccatgttttatcatgctcaaggtagagatttctcgcgtattgctgggtgatggtgctggcgccctgaaccttggccattgcctttatgtcagccagcgcggcggcggccatccgccggtaatcaaaaccgtggtgattgtaaaagttttgatcctccaccgcaatcgcggcctgcaccgctgtcggattgatatcttttaaccgaacccagtagcgcttttccccgaaatcggtctcacctagctttgagccgtcatttgcataaagaatcgtagactgaggaacccggacggagggggcgccctgccatttcgctgcaagaagaacggatgtgaagcagacgccggccagcattccgccgatcagtgtcagaaagatgcaggcgcggatgattttgaacgtgattctgagctgttttccagatactttatccacttttgggaaccccctttttcatgattctattattatgtgaaaaaagggggttttttaaacatatcaaaccggacacttctttactttttcccctccatcctctatactttttccttaggtgaaaatgagattttaaccggaataaaagcgatacagacgcttacaataaatgaaataagccttgaaagggagatgacaattgagcgagctttggtatacggagaagcagacgaagaatttcggcattacattaaaggtgaaacaaacattacatacggaacagacggaatttcagcatctggaaatggtggagacagaagaattcggcaacatgctgttcttagacggaatggtcatgacatctgaaaaagacgaattcgtctatcatgaaatggttgcgcacgtcccgttatttacgcacccgaatccggaaaacgttctcgttgtcggcggcggagacggcggtgtcatcagagagattctgaagcacccaagcgtaaaaaaagcgacgcttgtcgacattgacggcaaggttattgaatactctaaaaaattccttccgtccattgcgggcaagcttgatgatccgcgcgtcgacgtgagagtcgatgacggtttcatgcacatcgcgaaatcagaaaatgagtatgacgtcatcatggttgattcaacagaaccggtcggaccggccgtcaatctgttctcaaaaggcttctatgccggaatttccaaggcgttaaaagaagacggcatcttcgtcgcgcagacggacaacccgtggtttacaccggaactgattacaaacgtacagcgtgacgtgaaagaaatcttcccgatcacccgtctgtatacggctaatatcccgacgtacccgagcggcctgtggacatttacgatcggttctaaaaagtacgatccgcttgaagtagaggacagccgtttcttcgacatcgacacgaagtattacacgaaagagcttcacaaagcggcatttgttcttccgaaatttgtgagcgacttaatcaaataaaaacgtacggcgcaggagcgaatcttgcgcttttttacaggaaagcgagggaattattgatgagatttgatgaagcatattcaggaaaagtatttatcgcgagccgccccgactggaaagaggcggacgccatcctttacggcatgccgatggattggacggtcagctaccgtcccggttcacgattcggcccggggagaatccgcgaggtgtctatcggtcttgaagaatacagcccgtacctcgaccgtgacttggctgatttgaatttctttgacgccggagacattccgcttccgttcggcaatccgcaaagaagccttgatatgattgaagaatacgtggacggcatcctagaaaaaggcaagttcccgctcggcatgggaggggagcaccttgtatcatggcctgtcataaaagccatgtataagaagtttccggatcttgccatcattcattttgacgcgcacaccgacctgcgcacggattatgaaggcgaaccgctttcccactctactccgatccgcaaagcggccgagctcatcgggccgcaaaacgtattttcattcggcatccgctccggaatgaaggaagaatttgaatgggcgaaagaaaacggcatgcacatttctaagtttgaagtgcttgagccgctgaaaaaagtgctgccgcagcttgcgggacgcccggtttatgtcacgatcgatatcgacgttcttgaccccgctcatgcgccgggaacgggcacggttgacgcgggaggcatcacgtctaaagaattgctcgcgtccatccatgaaatcgcgcgctcagaggtcagcgtaaaaggcgccgacctcgtagaagtggcaccggtctatgaccactcagaacaaaccgcaaacacggcaagcaagatgatccgtgaaatgctgcttgggtttgtgaaatagaaagaatttcccccgcttgaaacatggcgggggatttttatattgtatataaactacttagaagttagtaaaagaaatatattattttactattaataattgatgttattgataaaaattatataatagggtattatttagtaaatacatctttagaaaggaagttagaatgaaaacagcagtagaaaatgaattggaattaaaaaagattgaaatttcagtaattaaactgataattgctgaaaagcctaataaagagatcgctaagtcattaaactactcgcagcgtaatgtcgaatatatcatagccggtctttgtaaaaagtggaatgtaagtactagagtcggtattgtttcggaagcatataaaaggaattgtatacagtgaacgaaatgaaagaaaaacccctattgagggggtttatttatatatgctaaaaaaacattctatacaggaatgccgtaaaaataaaaactgagattgtcaggtagttcaaatttgttctccatttcagaagaataaacaaaagaaataagtatgcaatattgaacaaatcaaagatagaaaaaatcaaatgattacttgtgaaaaataaactagtgtttggatgttgtgcgaaaatatttttgaatgatataagaaaaaacttaatcgcgaccgggatgttagaaaacataaatagggaataaaaagttttgatcttaatctgagcgccaagaaaatttataatgagaaataatacgaatccttcaaaaatgaccccgaacattaaaagaaacagtgcggctattgcaatgatgtaatctaaatgttttacttgctcaacaacttgtatagggatgtttttgggaattaaacttttcataaaaggtaaaagggaacttaaataaaaagctaacccgataatataaaacaaaaacgaggacaaaaaattaatgtttcgttccttaaatgaagataattcaatttgcataatcctaagaggctccttttataaagataggtgtaataaatgtttctaacatagctgctatcattaaaccgagaaatataataccaatatatttaaaagtgaatttcaaatttattttgaggagtaataaatctaaagttaatttcattcctacagaggctgcaagaagcaataccggcacttcaattattccatggggtataacaagcagtaaaaggtttaaattgtctttaatgtttcctatcgcatttcctaaaattaatccattaataattaaaacagcaaccgtgccaagcgacagcgttaacgggcctaaaaaaacaagcagactcgctactttaatattattaaagaaaatctgaaaaaaatccggacggatatttcgatttagattatttacatttgaagcggaatctgtataaatatatgctgtaaataaagcaattaaaaataagatcagacagagtatgtacaatttgactaaaacattctttttaaacaatgtattttcatccattcgttaaagggactgccagggatattgaatttaatgttttatattatgctgctgctgtacttgctgcagccaattgttctaaaacggccaatggcaagcctgcaccaagagatcctaaaacagtaatgatagccagaactgatcccgttgcggtgatagcactgacaatccaactaggagcgataattccagctctgtttaaaatatcgataacatccatgcttaaatgattatgtttcatactgaaaagagcgagaacaatgattcctgatgctactaatgtaaaaatcgctttactattttgtgtttttaaaagtagattcattttttcctccaattttttcaatatccccagcaagttaaataataaaatatattggaatctatttgaattgcggatttccgaaaaaataatagttaagaggtgaaatccgtaaaagtatctgctggcttatttcgtacaaagaaagccggaccatatgtatgatccggctttctttggtactgaaacattatacttttttttcaaaaataatatcaaaataatcagctgccccatagcctgaaatagcaggagcaaatatttgaaccagctttcacccttgctgcgaatacttttcaataatttatttatagtcttctttaggctttcctttccatcggtttacttctgcttttatgaacttgtattcgtacattgctgtataatcctccggaagtgtattggaatcgttaccttgtttttcgattttgataaacttgaatccataaatagagcgcgcagcctattaaaagaatcggaaattgccatcctgtatttccgtttttaaaataatctattaatgaccatatcagtaaagcgacagtataaaaactaaatgctattctggcggctgtacccgattggtgtttttgcatctcatccattttcttcataagaaccgctcccttaattttttttggcgttatagttgaatactttatctattcccgtatttaaagcgtgagctatcgaaaaagccagacttaaagtcgggtcatatttattattttcaattgcattgatggtttgcctggtcacattgcagagcttagccagatcattttgtgaaatatcagctgctgttctaagtttttttatattgttatccactaaaaccctccttaacttattttgttttttattttaaattttcaaatttatatatatttattttaaataatatatgtataagtgtcaaatactttttacacatttgagttctaaggtatgttttttgtttttgtaaattagttgtttatataaaaaacggcttgcagtttaacctgcaagcctaaaagtaattatcatttaaatcatagctctttgtgctacttcgaattggtgtgaaggtgtattcgtcatatctgctgttataaaaactgaggttacagctaagcaagtgagtaagaccttatacttcagcttcataaaaagttacccccccttgaatatgctgtcttgcttcttcaacttttaaaaagtatgttgaagcttttttataatcttcaagtttgtgataatatttagctgcatcaagagcaaaatcttctatatctgcatacatcatcttactttccaaaaagtcaaaactccttttcattgcatcctcatcaggtccgttcacatacaaagattttaaaaattcgaattcatgtaaataaactgaatctgctgactcttcggaatagataactccttttttatgatactcgagcgctttgtcgtatctttctaatttataatgaatctgtgtcattaaaaaatatgcttggggcaaagaaggggtcattttagcactttcaaaaacatcaatggctttttcaacataagttatagctgcttcatagtcgttcaggctttgtttgcaaagtgcgatgttatacagcgtcctgcccattaattgaggctgtttttctgtttctgccaaagaaaaagccttttgaaagtgagtaattgcccgatcatatagttttaaatccaggaaatttgctccgaataaggattggcattgtatgagcctgatatcgtatgacgactgagctttatatatttcatatgcctgccttgcgtaatcggtagatacatacgtttgtttcaaatagtagtagacttcagacatcttgaaaaagtactcggctttatcaatagtatccttaataaatgagagtttcgtctcagcctttttaaaaaattttatagccgacaaatattcccgctgatccagctcatacatcccccggaaaaaattaaaataataatcaagccgtccggtcagccgggcctgctttttatcaatatccgcgagcagatccgatagtctcggctgttcttctatccgctgcgattccagcggttcgaggtattcgagcatcagattgtggcggaattccatgagagaatagtacagatgaagatcctgatcttcttccaggcctgcaagctcttctttgatttctctccgcaagtactcggcgtccgggatgctgaaccttcgaatgtacatataccattcgttgattttttctccaaccgctgaagacgataaaacactcgccactattccgaatccctcccttccacgttatgtatatgacatattttatcattttcattcggaaggatagcgcaaaaataccgcaaacttttcccctttgacaaagccgtccgccgaaggaaccgcatttatcccgcagcctaggatttccggttttttcattttccttaaaaatcatgtttatcttcaaaaccaatcagcaaagatggtaagataggaggaagcggttgaactttttcccttgaaaacttatactattcaggttaagcgggatgatgaaaaggaagtgtcagcatgagacaggagacaccagtagccattcatgtgcaatcattcattcataacggctccgaagaagagtcggttgaatttacatcgagtggattctattacgtgagaaacggcaaaacgtatctttcctatcacgaagagcatgatttgggcaagattaaaacggtcgtcaagattacagaaaaagagattctcgtaatgagatcgggcgccatccaaatgaaacagcggttcattccgggggcatcgacactcactcaatataaactgccgttcggacaaatggagctccgtacggaaacgaaaaacattcaatctgatgtcggcggttcggaaggctccgtcaaactgacatataacatgactgtaggcgaaaaccaagaacatgtacataacatgacgatccaatataaggaggaaacaaaggcatgaatattgcggaacaaatgaaggacgtgctgaaggaagagatcaaagcggccgttctgaaagcgggcctggcggaagaaagccagattccaagcgtactgttagaaacgccgaaagacaaaacacacggtgattattccacaaacatggcgatgcagctggcgagaatcgcaaaaaaagcgccgcgccaaatcgctgaggagatcgtggcgtcatttgataaaggcaaagcttccattgaaaagatggatattgcggggcccggctttatcaacttttacatgaacaacagctacttaacaaaactgattccgtccgtgcttgaagcgggtgaacattacggagagacaaacatcggacaaggcgaaaagattcaggtcgaattcgtatcggccaacccgacgggagatcttcacttaggccatgcgcgcggcgcggcggtaggtgacgcgctgtgcagcgtgctttctaaagcgggctatgatgtgagccgtgaatactatattaatgatgcgggcaaccagattaacaacctggcgctttccgttgaagtccgttattttgaagcgctcggcctcgagaaaccgatgccggaagacggttaccgcggcgaggatattatagcaatcgggaaaaagcttgccgaagatttcggcgaccgtttcgtacatgaagaggagagcgaacgtcaggcgtttttccgtgaatacggcttaaagtacgagcttgataaacttcgctccgacctggaaaacttccgcgtgccgtttgacgtatggtattctgaaacgtcactgtacgaaaacggaaaaattgatcaggcgctcgaggcgcttcgcgaaaagggccatgtatacgaagaggacggcgcgacatggttccgctccacaacgttcggcgacgataaagaccgtgtgctgatcaaaaaagacggctcatacacttatctgctgccggatatcgcataccataaagacaaacttgaccgcggattcgacaagctcatcaatgtatggggcgcggatcaccacgggtatattccgcgtatgaaagcggcgattgaagcgctcggttacaagaaaggcacattggaagttgagatcattcagctcgttcatttatacaaaaacggcgaaaaaatgaagatgagcaaacgtacggggaaagccgtaacgatgcgcgacctgattgaagaagtcggcttggatgccgtgcgttatttcttcgcgatgcgcagcgctgatacgcatatggattttgacttggatcttgccgtatccacatctaatgaaaaccctgtgtattatgcgcaatacgcacatgcacgtatttgcagcatgcttcgccaaggggaggagcagggacttaaaccggcggcagatcttgatttcagccatattcaatcagaaaaagaatatgacctgctgaaaacaatcggcggcttccctgaagcagtggcagaagcggcagaaaaacgcattcctcaccgtgtcacaaactatatttatgatctggcttccgctctgcacagcttctacaatgcggagaaagtcatcgatccggaaaataaagagaagagccgcgcgcgtctcgctttaatgaaggcgacgcaaattacgctgaacaatgcgcttcagctgatcggcgtatccgctccggaaaaaatgtaatgatgatcaaaggacaaagtcttcgggctttgttcttttttttgcatataaagcgtgtgatgtaattcacaatccagcacactgagtttttgtatgataagactgatattgaatcagtgaaaggggcaagccgaatgatcaatcgtcaacatattcaattatcgctgcagtctttaagcttagtggcagggtttatggtgtgggtgctgatttcatcgctcatttctcaaatgacatcagatattcatttaagcaaaggcgagatttcattggtgacggcgattcccgttattctcggatcgcttctccgtattcctttaggatatttaacgaacaggtatggcgcgcggctgatgtttatgatcagcttcatcctgcttttgtttcccgtattttggatcagtatcgcggattctttatttgatttaatcacgggcggctttttcttagggatcggcggagcggtattctccatcggagtgacgtccctcccgaaatattatccgaaagaaaagcacggtgtcgtcaatgggatttacggtgccggaaacatcgggaccgccgttactacctttgcggcgccggttatcgctcaagccgcgggatggaaagcaaccgtgcagatgtatcttgttttgctggctgttttcgcattactgcacgttttgttcggcgaccggcatgagaagaaagtcaaagtttccataaagacacaaatgaaagccgtttaccgaaatcatgtgctgtggatgttgagcctgttttattttattacgttcggcgcctttgtcgcctttaccatctatcttccgaattttttggttgagcattttgggctgagccctgcggacgccggtctgcggacggccggctttattgcggtctctacgctgctcaggcctgtgggagggtttcttgcagataaactgagcccgctccgcattctgatgttcgttttcgcagggcttacgctgtcaggcgtcatgctgtcattctccccggcgatcggcctttatgcgttcggatcgctgacggtggcagtctgctcagggattggaaacgggacggtatttaaactggtgcctttctatttttcgaagcaagctgggattgccaacggtattgtgtctgccatgggcggactgggcggttttttccctccgctgattctggcaagtgtatttcaggcaacgggtcaatacgcgatcgggtttatggcgctttcagaggttgcgttagccagctttgtccttgtgatctggatgtattggcaggaaagaatgaaaacacatacggagagaaacagtcatagccttgattcataatgatccattcacaagattgttagttttttctgggtgagtgcaaatcaagtcacgttacaatatacatacgcaacgtgactttcttcgaggtgagctcatgaatattctctctgtccgaaaatctgataaagaacttctttcccgcgaactgcatgaattgctggaatcgatcagtacgaaaaggaaaatgaaaaaacacacgtatttgtttcaagaaggaatggatgcagaagagctttatctgattcaatcaggactcattgaaatcggcaagctgacatctgacggaaaagacctgacacttagaatctgccaaaaacacgatattgtcggagaattgacgctattcacagatgagccgagatatatgctcagtgcgaaagtgttagaggacggggaggtgctcgtcattaataaaaacaggctggaaaaggaattggtccaaaacggtgttttgacgtttgaatttatgaaatggatgagcacccatctgcgaaaaatccagtctaagatcagggatctgcttcttcacggcaaaaaaggggcgctctattccacccttatccgcttatcaaacagctacggggtggaacgaagcgacgggattctgattaacattgtgctgacaaatcaggatttggctaagttttgcgcggcggcaagggagagcgtcaaccgcatgctgggagacctccgcaaacaaggggttatttcgatagacgaaaccggaaaaattattttgcacaagcgggactatttacgatgcgagatcgagtgtgaaaattgtccgcttgagatctgcaatattgactgaaaaaacaagggcagccggtgtccttgtttttcagcttgtgatacatatacacatgacggcgaaaaagaagccggcatttacgatttccagaatgccgatcgttttcaccggccagtctcttccgtgaaaaaaccaggcccgcagactgcttgggataaaagcgagaaacgcccagcctgccccgagaagagccgataaaaaggggagcaagaggtgatatccccacgaccagtaagcaaaccttctgttttttctctcccgtatgaccgatttcacataaaaagaactcccgacaaaaaataaagcggattgcaagaatagaaaccaagcccagccgtcaaggattcccgttcccagccagcagctcgcaagcccgcctgaacaaaagaacaagactcccgcaatatcattcgtgagcgcccgttcgttttttcggcgggcataatgcgtatgtatgagaaacagcggcaataaaaaaacgccgatccagacgagctgcggcttatgaaagacagaaatgatcaaaaagcagcaggccggaaaaccgtaataccatatccacttttgataaggctgaagctgtttctttttcaaagcgagcgaaacgggataaaccgtcaagtaaaggaacagccagcccagaaagagcggaatatgccagaaaaccgggcctcccttgaccatgccgagtaaaaatggaatcagcagcatcgcccatgcgccgtgctgcttcggaatcatcgctttcatcgaaaccctcctttttatttcattataagtgcaaacactctcctgataagtgactttcatcatacaagctgtgaaatacatcactgccgcgcgggctcaatcgggctacactaaagctatcaatagcacaggaggctttcctatgaatcagtgtgactatttattatttctgaaacaacttcctatgtttaatgaagtgcctctgtccattgtcgaaaccttgctgaaaaacgggacgtttatccgcggctcatctgaccaatctccatcctttcttcattcacaatccgtttatattgtattaaaaggcaatatccgttttacggacagcaggctccctgaagggtcgcaaaccgttgcgctgtgggaaaaaggcgatgtgtttccgattgatgaaaaaggcgggctctctttatcgccttttatctcagtcaatgcctcaccggatattctggtactccatattccatattctatatttaagcaaatgatgtcttaccatccgcggctgcaaatgaactttttggcgatgcttcagcaaaatgtcttctgttcctatcagttgtttttgcggtatctgcatacatcactggatgaaaacgccgaacccggttcttaaacagaaccggtttttttgatgacgcgggcgtcctcatatcgtttaaaaatccttcctgctgctctgtgtgaacgttttgtgaaaaaagcagagtgtgtgacttagttcacaaggtgatgcgccgtctctgtttatagtgtacatagcatcacctgactcggaaggagtgaacgatcatgaagaaaaagaaaatgagtccgttgctcaggagattaaactatttttctcctatcgaacatcattcaaataaacatagccaaacgacaagcgaagatcgtgattgggagaatgtatacagaaacagatggcagtacgacaaagtcgttcgctccacccacggcgtcaactgcacgggttcttgcagctggaatatttatgtgaaaaacggaattgtcacgtgggaaggacaaaacttgaattatccatcaacaggaccggatatgcctgatttcgaaccgagaggctgtccgcggggggccagtttttcatggtacatctacagcccgctccgtgtgaaatatccatatgtgcgaggtgtgctgatcaatttgtggcgggaagcattgcagacgcatcaaaatccgctggatgcctggaaatcgatcgttgaaaaccctgaaaaagcgaagtcctataaacaggcaagagggaaaggcggctttgtccgcgcggaatggccggaagtgctgaagctgatttcagcctctctgctgtatacagtgatgaaatacgggcctgaccggaatgtcggtttttctccgatcccggcgatgtccatgatcagccacgcgtcaggttcgcgattcatgtctttaatcggcggcccaatgctcagtttttatgactggtatgcggatctcccgccggcgtccccgcaaatttggggtgaccagacggacgttccggaaagcagtgattggtacaattcaggctacatcatcacatggggttccaacgttccgttaacgagaacgcctgacgcgcactttttggcggaggcccgctataaaggggccaaggtgatttcaatcagtcccgattttgcggaatcctcaaagtttgcggatgactggctcagtatccgccaagggactgacggagccctggcgatggcgatgggtcacgtcattctgcaggaattttacgtgaatcaagagacggaacgtttcatggaatacgcgaagcaatacacggattttccattcctcgtcaccttatcaaaagaaaatggcgtatacacagcgggacggtttctgcatgcgaaggatatcggacggcagacaaagcatgatcaatggaagccggcggtctggaatgaacagacaggtgcgtttgccataccgcaaggaacaatgggctcccgctgggacgggcagcagaaatggaatctgcacatgatcgatgaagacaccggggaacagatcgagccccgtctctccgtgctcggaatagaggacgaaatcagtacggtgcgcattccgtatttttcaaatgacggaaacaaagtgcttgagcggaatcttcctattaaaaaactggaactgaacggtgaagaggtgtgtgtcacgactgtatttgacttgatattggccaactacggcgtgaaccggggcatcggcggacaatcagccgcatcttatgatgatccccgtccgttcacacctgcctggcaggaacagatcacgggaattaaaagagaagccgttatacagattgccagggagtttgcccaaaatgcgattgatacagacggcagatcgatgattatcgtaggggcgggaatcaaccactggttcaactccgacacgatttaccgcgcggtgttaaatcttgttttattggtaggcgcccaaggcgtaaacggcggaggctgggctcattatgtcggtcaggaaaagctccgtcctgctgaagggtggcagacgatcgcaaccgcaaaggactgggaaggcgtgcctaaactgcaaaacggcacctcatttttctactttgcgacagaccagtggcgttacgaagaccagccgatcagtgacttggcttcaccgatcgcttcttcatcccgctacaagcatcacgccgattacaatgtgctggcggcgcgattagggtggctgccgtcctacccgacattcaatcaaaacggcattgatctgtacaaagaagctgagaaggcgggggcggcgacacctgaagacgtaggtgcgtacgtggcctcacagcttcaggagaaaaaactgaaattcgcgattgaagacccggacaatgaagtgaatttcccaaggaatctctttgtatggcgggcaaatctgatctcaagctcaggaaaagggcatgaatattttcttaagcatctgctggggacgacgaacggtttgatgaatgacgacagcgacagcatccgccctgaagaaatcaaatggcgggagcaggcgccggaaggcaagctcgacttgttaatcaatctcgactttcgaatggccggtacggcgctgtattccgatatcgtgctgccggcagcgacatggtatgaaaaacacgatctcagcagcacggatatgcacccgttcattcatccattcgctccggcgatctcggcgccgtgggaatcgaggtcagactgggatattttcaaagcactgtcaaaagccgtttccgacctggcggaagaagtcgatatggagctggtgaaagaggtagtcgcgacgccgctcctccacgacacgatgcaggaattggcccagccgttcggaaaaatcaatgactggagcaagggcgaatgtgaagccattccgggaaaaacgatgccgaatatccaagtcgctgaacgggattacaaacacatttttcataaaatgaccgcgctcggccctcatacggctttaaaaccgagcggaacaaaagggatgagctggtcgattgcggatgaatatgaatcactcaaaaagagactgggagaaaccgattcagacggcgttgccaaaggatgcccgaatataagtgaagcaaagcaggcggcagaagcgattttaaccctgtcgtccacctcaaatggaaaggtcgccgtaaaagcatgggaatcgcttgaaaacatcacaaacctgaagctgaaagacctggcggaagaacgcgaggaagaatgctttacgttcgagcaaattacagcccagccgaaaacggtcatcacgtctccggcctttaccggctcagaaaaaggagggcgcaggtactcgccgtttacgacgaatgtggaaaaattaatcccgtggaggacactgaccggcagacaatcctattatgtcgatcatgaactgatgatggaattcggtgaaacgatggcgacatttaaaccgatcctccagcaccgtccgttcctgagcaagcggcctgatcaagagggcaaagagatcgttcttaattatttgacgccgcataataaatggtccgtccacagcatgtattttgattccctgccgatgctgacgctgttccggggcgggccgaccgtgtggatgaataaagatgacgcaaaggacacggatatcaaagacaacgattggattgaatgcttcaaccgaaacggcgttgtcgtggcgagagcggttttgtctcaccggattcctaaaggaatggcgtttatgcaccatgcccaggaccgccacatcaacgtgcccggcacaaaactgacgaataaccgcggaggcacccataacagcccgacaaggattcacgtcaagccgacccagatgatcgggggctacgcacagctcagctacggctttaactattacggtccgacggggaatcagcgcgatctgaatgtcgtcatccgcaagctgaaggaggtcgattggcttgaagattaaagcgcagatcggaatggtcatgaacttggataaatgcatcggctgccacacgtgcagcgtcacctgtaaaaacacgtggacaaaccgttccggtgcggaatatatgtacttcaataatgttgaaacaaagcccggtatcggctacccgaagcaatgggaggaccaggacaaatataaaggcggctggacgttgaaaaaaggaaagcttgaactgaaatcaggcccgaaaacaaaccggcttgcaggccttttctataacccgaaccagccgacgattgatgattactatgaaccttggaactatgattatgaaacattaacaaacagcccgcagaaaaagcaccagccggtggcgcggccgaaatcgtccttgacgggcgattttatgaatatcgaatggggcccgaactgggaggatgatctcgctggcggccacattacgggtcttgaagatccaaacgtgcaaaagatggaggaatcgatcaaaacagaattcgatgaagtctttatgatgtatctgccgcgtatttgtgagcactgcatcaatccggcgtgcgtgtcctcctgcccgtccggcgccatgtacaaacgcgaggaagacggcatcgttctcgttgatcaaaacgcatgccgttcatggagatattgcgtctcatcctgtccttataaaaaagtctattttaactggcaaacgaacaaagcggaaaaatgcacactctgctttccgcgcttggaggcggggctgccgaccatctgctccgaaacgtgtgtaggcagaatccgctatctcggcgtcatgctgtacgacgcggacaaagtggaggaagcggcctccattgaaaatgaaaaggatctctaccattcccaattagacgtttttcttgatccgaatgatcctgaagttgccaaactggcaaaagaacaaggcatcccggctgaatggatagaggccgcgcagcaatcgccgatctacaaaatgatcatcgattggaagattgcgctgccgcttcatcctgagtaccgcacactgccgatggtttggtacattccgccgctgagcccgattatgaatctctttgaaggaaaaggcagccggcaaacggcggaagatatttttccggctatcgaccaaatgagaattccgattgactatttggcccagttattaacagccggtgatacggatcatattcggtcaacgttaaagaaaatgtctgtcatgcgccagtatatgagagcagtccagacgaataaatccatcgacccggcactgatctccagtgtcggcttaacagaaaagcaaattgaagacatgtatcggctgctggcgatcgccaaatatgatgaccgctttgtgatcccgagcagccatcgagaagaagtgtctgatttatacgctgaacaaggaagctgcggcttgtcattttcaggcggccccggctcttgtttctaacttttgataaatgaggtggaacaagatgaacaccacagaccggcaaatgacattctccgctctttccattcttctctcttatccggatgaagagtggagagccgggcttcccgattggaaggctcttatccatgaaatcggcattcagcaaatccgtgagaaactgctgcactttttagaggcggcagccggcttttctccgcaagcgctgattgaacactatgtgtatacgttcgacttcgggaaaaaaacgaatatgtacgtcacctactttaactcaggcgagcaaagggagcgcggaattgaactgctgcatttaaaaaacacctaccagcaatccggtttcctgccgacagagaaagaattgcctgattatctgccgctgatgctggaattcgccgcggttgcggagattgaagcggcgagaagcgtgtttgagaaatacctgtccaatgtgagggagctggcttcccgcctcgaaaaaaatgacagcctctatgctgagctgctgcacgtgctgcaggccgcgctggaaagcatcggtgtacgtgaaagcactgaagaaggggctgctcaggcatgagcgggcagatcctgtgggggattatgccgtacatggtattgacgatctttatcggcgggcatatttaccgctatcagcatgaccagtttggctggacggcgaaatcaagcgagctgttagaaaagaaaaaacttgcggcgggcagcacactttttcactggggactgctgttcgttgtcggcggacatgtcatgggaattctgatcccggaaggcgtgtatactgtactgggcatttcagagcatacgtatcacaaaatggcgatcggcgcaggcctgccggctgggatcgcggcttgtgccggactagtgatcctgacatacagaaggctgtttgacaaaagaatccgcaaaaccagctcgccatcggatatcctgacgcttattctgctgctgttcatgatgctgtcgggcgttgcggccacgtttctcaacattgactcgaaaggatttgattacagggcaacagtcgggccgtggttcagggaaattgttttgttccggcctgacgcttctttgatggagagtgtcccgctatggtttaagtttcatatcatcatagggtacgtcgtttttatcctttggccgtttacaagattggttcacgtgttcagcctgcccctcaagtatttgacccgcagctatgttgtctatcggaaacgcacgtaaaaatccccctgcaagagggggatttttttatggtgaaaaaataaaaacataagatattttctgccaaggtaatggctgggcggcggggattcctgttatgttttatgtggaaataatatcaacaaaaggagagtgaagaatgaagcggattttcctcattttagccgcctgtctgatgacaagcgccggcgtcctgacactcagacattctcatgtattaaccggcggcacagcgggactgtcactaagcctgtcgtacttgtttcattcctcatttgcgattatcttctttctgatcaatatcccgttttatatattttctctcatcagaatgggaatcaaattcactctatccaccgtttttgcagtcactgtgctgactctgtttaccggcgcggatcactggctgccgccggtctctgtttcaccgcttgccggggcgatttgcggcggggcgctgatcgggttcggcctgtcgctcatgttttatcatcaggcatcgctcggcggcgccaatatcctcgctttatttctgcaaaagcgctgcggatggaatccgggtgccgttaatttcctcttcgattttggcgtcgtgctggccggcattttttccgtcggattgctgaaagggctcttctccttagtgtcgatagcggtcaccggtctgatcatcggcatcttcaaaaataaaatcaaaggcagctgctcgctcaatccggcattgcttcagaacatcacaaccggccagtcacaggaagtgtcatcataatcctttccgctcgtgcggagaggatttttcatatgtttacaggccggaaaacagagggtatacagagatatcggatcagatgggagagagtcgggatgctgaaaaggagactggaattttgctttttatatatgatgcttatcggagcatatgtcatatggttttttccggtttccaggcttgagttttacggagggttgctttgctatgcaagcattattttgttcagcatctattcgttaattcttgaaaaccgcacctctcagcacacgctgttatggattcatattcttgtgttttttccgatcgccgggtacttattttaccttttttccggccagctttatgaaaaaggcaagctgttcaggtcgaaacggacatacaaccgggaaaagctgagaacgatatttgatatggaacagacgcccgatctgtccgggctgaaaggaaatcagaagcgtttctttcaatattcaatcaaggcgtctcatatgaatatcaatacaaaaagcaggctgaaggtgctcaaaaacggggatgaaacatttccggagctgtttgaagcgctccggtcggcagcatcatttatacatattgagtattacatgttcaaatcagacatgcttgggcacaagatgatggacattatgatggaaaaagcgcgtcaaggcgtggaagtgcggtttttgttcgacgcggccggcagcctgaagctggccggaaaagacattaaaaaactgaaacgcgcgggcgtgaacatcgtcccgtttctgccgctgaaatacggttttttcaaccaaaagttcaatttcagaaatcaccgcaagatcgtcatcgttgacgggaaaaccggttttgtcggcgggctgaatgtcggcaaggagtatatcggcaaagaccaaagtgtcggtttttggcgggacacccatatgaaagtcgaaggagaaatcgttcagacgctccacagcatttttatgcttgattgggaatacgtttcggatgaggtgctgattgatcagaaagcatacagccgcccggtccctgcagaaagcggcggcgtctatcaagtcgttccgacgggccccgatatgaaggagcggatgagcgatctgtattatgccatgatagcggcggccgaatcatctgtatggatcgcgacgccttatttcgtgccgaatgagccgatccgcacagcgctaaaggaggctgctgccagaggcgtccgggtgcgagtcatggtgccggaaaccaatgacggatttttaacccagtacgcgacgagatcgtatttccccgagcttcttcgcgaaggaatcgaagtctattcctatcaaaaaggctttatgcatcaaaaggtgctcatcactgacggaaacctcgcctctgtcgggacggcgaacatggacatgagaagctttcagctgaactttgaggtcaatgtcttttttacagatcaaaaggcgatcaaagatcttgaagcgcattatctggaggatatgagagagtctgagaaaatcagccccgtccgtttctataagcgcacattatgggaaagaacgaaggaatccttcgcgcggttattttccggcgttttataaaaaacgcttttaaaactccttgtgtatagtataattgagaaatattatcattaggaacgaggcacaaggaggacggaaacgtgctgcgacaatttttttcttattataaaccgtacaagaagctgttttttctcgacttcttttctgccatcgccggcggattgatggagctgagttttcctctgattgttaattactttatcgatacattgctcccggggcgggattggcgtctgattattttgacttccgctgctttattcggagtctacgccctcagctcggcgcttcagtatgttgtgacgtattggggccatatgctcggcattaacattgaaaccgatatgcgtaaaaagctttttgaccatctgcaaaagctttcgttcaaattttacgataacaacaaaacgggcagtttaatgtccaagctcaccaatgatttgatgtatatcggagaaaccgcccaccacgggcctgaagacctgtttatcgcggtcatgacgattttgggcgcgttcggtgtgatgctgttcattaactggcagctcgcgctgttgacctttatcattatgccggtcgtcatttggcttgctttgtatttcaataaaaaaatgacctctgcgtttacaaaactgaacaaagacgtcggagacttcagcgcgagggtcgaaaacaatatcggcggcatccgtcttgttcaggctttcagcaatgaagcgtttgaaacgcagcggtttgacgtgaacaatcagcgtttccgcaaaacaaagctgacgtcatataaaatcatggcgaaaaacggctcgatcagttacatgctgacaagattcgtcacgctgttcgtcctgttgtgcgggacatggttcgtgatccgcggatcgttatcttacggggaattcgtcgcttttgtgctgctgacgaacgttctgttccgtccgattgataaaatcaacgcaattattgagctgtatccgagaggcatagccggttttaaaagctttatagaaataatggaaacggagcctgatatcaaggacgccccgaacgcgagacatgtgtccggtttaaaagggaatatccgttatgatggtgtgtcattcggttacgaagaaaacagcccggttctgtcgggaatcaatttgtccattcatgcaggggagacagtcgcattcgttgggccttcgggagccggaaaatcaacgctgacaagtctgctgccgcgtttttatgatccgtctgaaggcgtgatttccatcgatggaattgatattaaggacatgacgctgtcatcattgcgcggacaaatcggcgtcgtccagcaggatgtctttctgttttccggcacattgcgggaaaacattgcgtacgggcggctcgatgcgtctgaggaagaaatccggcaggccgtccgccaggcgcatttagaggagctggtaaacgggtatcccgacggtttaaacacggtgatcggcgagcgcggcgtgaagctgtcaggcgggcagaagcagcggctttccatcgccagaatgtttttgaaaaacccgtcgatcttaattttagacgaggctacatcagccctcgatacagaaacggaagccgccattcaaaaatcgctgcaagagctgtctgaaggacgcacgacgcttgtgatcgcccatcggctggctacgattaaggatgcggacaggatcgtcgtcgtcacgaaagaaggcatcgctgaacaaggtcatcataaggaactgctggcatccggcggcatataccagagactccatcaggcccaattcggcgagctgatacatgaataatggaaaaaggatagacgagcgggggccgggcagcctcctgtctatccttttttttatgtagtccgtatttaatgggcttctttttgcgcaggttcgatgatatgtttgaaacggtcaacaagctgcaccgctttctttccttccactacaattaaatattcttgttctttatgagccattctgaacgtttccagctcaatgatatctttgattttgcacattgtttttttagagtagatatacagctcgtggcctcccgtgtggcaaagctgataaagctgaagcatgtttcttaaagtgaacttcttagcggctattttcaaagatgtaatgtttttcatgtgttttctcctccgtctgatggtctgttatttcggaaattccccatatgaacgggtgataaacctggttatgccttccacctcagcactccgcccgccaggcgtttaactccgcggatggcgcttaattcttcgacgagccggagcagcgcccggtctttctctttcgcctcaatcataaaatcgatgcccgcatcccattgtctgaaccgctccagcaccggcagaataaaattcgcgtccacatagtccgcatgactgcgtacggctgattctgattttggcgaggagagatggaccttcggctttaagccgatccgctgccatgttttgatcatccgcggaagaatgtcatctaaatcagcgtcatcggccggattggcgtaaaaatggtgataatcaaacacaaacggaatgccttcttgctcacatacactgagtgtttcctcggacgtatatgttttatcatcgttttctaaagtcatccgctgtttgatgacttcgggaagttctttcagattcacgcggaaacggccaagcgcgctttgtttgtcaccgtaagcgcctccgacatggatgttgatgacggaacggtccgcgatgcccattgcgtccagcatgtcataatgataggccatatccttgaccgcatttgcggtaatctcccgtttcgggcttgtaaaaagcgtgaattggttcggatgaaagctcgttctgaggtcatattttctgaccagcccgccgatctcacgaaactcctggcgaaacggcgtgacaaaatcccacagtacatccgggtgcgtggcgagcggcacaattgagcttgagaacctgtacaaagggatgccgtggccgaccacatagtggagggtgcgcagcgtattggtaagatttgctttcgtcacagaaagcagagcgtctttccgctcactgcgggaaagcttggtatagcgcgcatatgttaaggttttggcgggggacgcgtcccaaaggcacatggcgtttgcgacgaatccgaatctgaacagcatatggtttctcctttataaaaagtaagatatggcctttcccagccattctgcaggaagctgtctgacggagcgctgtttcactttttctaatgtgagaagctcggatttttcgatgtcctgctttatggttgaaagcacttcctttgtaaaggcctcatcatgaatgatgacatttacctcttcattccagaacaggctccgtttatcaaaattcggcgtgccgataatgctgatgcggtcatctataatgaaggctttaacatgataaaagccttgataataccgatagatgaggcagccggccttcaggagctcgggataataggtaaaagctgtttcccgaacgagcgggtgatctgatttcatcggaacgatcaagatgactttgacgccttttcggcaggctgaaataagcgcttcctgaagctttttgctcggtacataataaggcgtgccgatgatgatttttttctccgccttacggatgcagttttcataatgcgattcaagcgaaaaaccgtcagatgcatatgtcctatgagagatattcccttcggataatgccggataaaccccgggtgattcgggtgtttttccggtgtttcgtttcaggtcgcttacaaaaagagtctgaagatctgccgtgccttcgccggtcatccgcaggtgataatcctcccagtttccgaacttcgctttttttccgaggtactcttcagcgatattaaagccgcccacatagccgattttgccgtcaatgacggtcactttccggtgattccgtttttgcagcctgaaaaaaagaaagggaaatgccggtttatttagaaaatgaacgtgaacgccggcttttttcatcgtttgaatggaaggctttttcacttggcggctgcccgcccaatcgagcagcagatatacggagacgccggcccgggccttttctttcaataaatcaaacatctcatggctgacttggtcgttcttcataataaaaaacatcatatgaatagaagagacggcttggcggatatcagccgtcatctgctgcacaagctcgctgccgcagtgaatgagtgtgatatcactttttttggggtcaaaaacgggctcatacgcctgttttttgtacgccgcccggccaagcagcatatcaagcagcataagtgcgatcaatatgataaaaatgacaagcaacacaaaaatgaccttcataccgacgctcctttccgaagtatccgtagtgtgccctgagaatgtgaatttaattattgactgaacactcattcattatttatgataaagtaaagatatgacaatgaagaggggaatcagaacaaagggggagacaagatgaacgcatttctcatggtaaacgcgctgctgttttcagctgtaaccgcttacgccgtttatttattcgtttacctgatcagaacgaggatcgcttatattaagctcggccaaagggaagaatttgataaacgcctgaaagaacgtcttcagaagatatgggtgaatgtgttcggacagaaaaaattgctgaaagataaaaagagcggaatcatccacgttctgtttttttacggttttatactcgttcagttcggcgcaattgattttattctgaaagggctgcttcctgaccggcatctgccgttcggcccgctttatccggcatttaccttttttcaggaaatcgtcacgtttctgattttaatcgccgtagtctgggcgttttaccggcgctacattgaaaagctcgtcagattgaaacgcgggtttaaagcggggcttgtcctgctgtttatcggcggactgatggtgacggtgctgctcgggaacgccatgaaccttttatggcacgatcattctctgtcttggacggaaccgatcgcttcctccattgcgtttgtgctcggcggtctttcagcgccggcggccgccgccgtgttttatgtttcatggtggcttcatctgttgtttttgctcagctttttagtgtacgtgccgcaatcaaagcatgcgcacttaattgcgggtccggcgaatgtgttcctcagcaggctggattcaaaaggaaagctggaaaaaatcgattttaccgatgagacgaaagaaagctacggcgtcggaaagattgaagacttccgccgctctcagcttgtcgacctttacgcctgcgtcgaatgcggccgctgtacaaatatgtgtccggcctccggtacgggcaagatgctctcgccgatggacctcattttaaagctcagagaccatttgacggaaaaaggcgctgccgtgacatcaaaatctccgtgggtgcccgcgcccgtttttcagcacacgaaggcgaatcagctcgccgcggcttcctcagggggaggatcgcgtgaagcggcggcagccattgattacaacccgagcttaatcggcgaggtcatcacggaagaggagatttgggcgtgcaccacttgccgcaactgtgaagatcaatgtccggtcatgaatgaacacgttgataaaattatcgatctgcgccgctatcttgtgcttacggaagggaagatggacagcgacgcgcagcgggccatgacaagcattgaaagacagggaaacccgtggggcttaaaccggaaagagcgggagaactggcgggagcaggctgatacagagattccgacagtgaaagaaatgaaaaaacaagacaaagagttcgactatttgttttgggtcggctcaatgggttcctacgacaacaggagccaaaagattgccgtttcatttgcaaagctgctcaatgaagcgggcgtatcctttgcgattctcggcaataaggaaaaaaactcaggcgatacgccgcgccgtttgggcaacgagtttctgttccaagagctggcggaacacaacatcggcgaatttgaaaaacacggaatcaaaaaaatcgtcacaattgatccgcacgcctataatatgttcaaaaatgaataccctgatttcggattccgggccgaagtctatcatcatactgaattattagccgagcttgtgtcacaggggaaactaaaaccgcttcacccggtcaatgaaacgattaccttccatgactcgtgctatttaggaagatacaacgaagtgtatgagccgccgagagcgatcttaaaagccattccgggcgttcaattgaaggaaatggagcgcagccgcgaaaacgggatgtgctgcggcgccgggggagggctcatgtggatggaagaagaaacgggagcgaggatcaacacggcccggactgagcaggcgctttctgtcagtccgacggtcatcagctccggatgtccttactgtctgaccatgctcggtgacgggacgaaagcgaaagaagccgaagacgcgatcggcacttatgatgtcagtgaattgctcgccatgtctgtattcggcgccgaaaaacaagagtctttatagaaagaagcgggccgccggcgcatatgccggcggctttgttttcgcacatcagccgatttatgaaggggcggctctaaaatttcttaaattacgctgtttagggtagcatattctgttttaatttgtttataatgagaggtatggtttatgaacaaaacaatacaaattcgttcttattataggatagaaacagatacatataagtaatagaaagggagtgtccgaccttgagtatcaaacaatattctcaggaacagctgaagcagatggctttagttgaaatcgctcacgaaattttctcagaacataaaaaaccggttccgttccaggagctgctgaatgaaatgatctccttactcggtgttacgaaagaggaactgggcgaccgtatcgcccaattttatacagacctcaacattgacggccgctttattgctctgtcagatcagacatgggggctccgcagctggtatccgtacgatcagctggacgaagaaacacagccgactgtaaaagcgaaaaagaaaaaagcgaaaaaagccgttgaggaagatctcgaccttgatgaattcgaggaagttgatgaagatgacatcgatctcgatgaaatggaagaagatattgaccttgacgcagacagctttgacgacgaagatatcgatgaagaagatgacgacgagcttgagattgaagatgagatgattgaagaagatgaggaagattatgatgatgaggaagaggatcgcaaagactgattttatatcagcaaaacgatcttgactttcattgtcgaactatgtagtatgtattttgggctcttcaaaaagaagagaattcataagagtgctacgctccctttcaagaaattgaaagggagctttcttattttcatctcccaaattcttttacacatcatttgtttttagtgaaatgattttctataaaacggcacattttaaggaatgtagcgcagaccgaagagaggagcaaacgaaatgacgaaatatatttttgtaaccgggggagttgtatcatcactcggaaaaggaattgtggcagcatcacttggccgccttttgaaaaacagaggcatgagcgtcaccatccaaaaatttgacccttatatcaacgttgacccgggaacgatgagcccgtaccagcacggtgaggtattcgttaccgatgacggcgctgagactgaccttgacttagggcattatgagcggttcattgacattaatctgaacagattcagcaacgtgacgacaggtaaaatctattctgccgtattgaaaaaagagcgccgcggggactacctcggcggaacggttcaggtcattccgcacatcacaaatgaactgaaagaccgtgtgtaccgtgcaggcaaagaaacaaacgcagatgtagtcattactgagatcggcggaacagtgggagacatcgaatctcttccgttccttgaagccatccgtcaaatgaaaagcgacatcggccatgaaaacgtgatgtacattcactgtacgcttgttccgtacatcaaagcggcgggcgagctgaaaacaaaaccgacgcagcacagcgtaaaagagctgagaagcctcggtattcagcctaatatcatcgttgtgcgcacggaaatgccgatttctcaagatatgaaagataaaattgcgctcttctgcgatattgacacgaaagcggtcatcgagtgtgaagatgcggacaacctttactccatcccgcttaaccttcaggagcagggactcgataagcttgtctgcgatcatatgaaattagaatgcaaagacccggatatgacggaatggaaagaccttgtcacgaaagtgaaaaacttgtctaaaaccattacaatcagccttgtcggtaaatacgtcgagcttcaggacgcttacatttcagtcgttgaatcactgcgccacgcgggctatgcgtttgacgctgatgtgaagatcaaatggattaacgccgaagaagtgacagaaagcaatattcaagagctgactggcggcacagacggaatcatcgtgcccggcggtttcggggaccgcggcgtagaagggaaaatcatcgccgccaagtatgcgcgtgagaataaaattccgttcttcggcatctgcctcgggatgcagattgcatccattgaatatgcgcgaaacgtattaggtctggaaggggctcactctgcggagatcgatccgtccactccttatccgatcatcgaccttctgccagaacaaaaagatgtcgaggatcttggaggaacgcttcgtctcggactgtacccttgtaagcttcaggaagacacgaaagccttcgaagcgtattcggatgaagtggtatacgaacgccaccgccaccgttatgaattcaacaacgaatacagacagcaaatggaagagaacggttttgtgttctcaggaacaagccctgacggccgtcttgtggaaatcatcgagctgaaagaccatccttggtatgtcgcttgccagttccaccctgagttcaaatcaagaccgacaagacctcagcctttattcaaagactttatcggcgcttccgtacaagctgcagaacagaagtaataaaaaaagacttgcctcctttaaaagcggcaagtcttttttctgcatcaggcatattcctgcatcatttcctttaacgtaaaggacagcgcgtgatagacatacaggcctgtcattaatgaaggaaagccgtatcttgtcccgtcttcatcgggcagaagcggcatttttaatttgctgtcaatatgaacatcacaaaattcctcaatcccggtttgatctttgatgacaggagatacgcaaacgaggccgacccctttttcataaagcttttgagccagcgcctgttcttcagccgtgcccggacctgaacaaaacatcagcaccctgtcgctttctgtaatcgaatcagctgtatccggaaacgctttgacagaaggcatcggttctgagccgagttccgcctcgcacaaaatgccctgcatctcatttgcgccgtataaataaatggtatgaccgctgacggctgcctgcgccagcaggcgcgcgccgtcttctattgcatcggactccttatcctgaatgcgggaaaaaatgcctgcaagctgcgtcgtaaatatctttaacatgagtgaaacctcctttacacatacaagaacagtatacaacaaaagagaaaatgctcagaaaatgtcggaaagtagactattataattaaaggaaatgtgaaaatcaaacagaatacataaacaactgcttccttttgacgaaaatgataatattggggtgtaaaatgatgaatgaaaagattttaatcgtagatgaccaatacggtatacgcatattgctcaatgaagtgttccataaagaagggtaccagacgtttcaggccgccaacggcatacaggcgctggacatcgtaacgaaagaacggcccgatctcgtgcttttagatatgaaaatccccggcatggacggaatcgaaattctcaagcgcatgaagatgatcgacgaatccatccgcgtcattatcatgaccgcttacggagaactcgatatgattaaggaatcaaaagagctcggagcgctgactcattttgcgaaaccttttgacattgatgagatcagagacgcggtgaaaaaatatttacctctaaaatcgaattaataaaattagaaacaattatgtcattgtgttgccgatttgtcgaaaagttggtatcctagagatggagaaaaagcgatctgttgttttacatatgacaggtttttatggtcatgctataggtggaaagcttttttcgagaagaagcaaatcaggctacataaggaggactttcgacatgcctttagtttcaatgacggaaatgttgaatacagctaaagaaaaaggatatgctgttggacaatttaacttaaataaccttgagttcactcaagctattttacaagcagcagaagaggaaaaatccccggttattcttggtgtttcagaaggcgcgggacgctacatgggcggcttcaaaacagtggttgccatggttaaagctcttatggaagaatacaaagtgacagttcctgtcgcgattcacttagaccacggttcaagctttgaatcttgtgcgaaagcgattcatgcaggtttcacttctgtaatgatcgacgcatctcaccatccgtttgaggaaaacgtagcaactacagctaaagtggttgagcttgctcatttccacggcgtttcagttgaagctgagcttggaactgtaggcggacaggaagatgacgtgatcgctgaaggcgtaatctatgctgaccctaaagagtgtcaagaacttgtagagcgcactggcatcgactgccttgcacctgcactgggttctgttcacggcccttacaaaggcgaaccgaacctcggtttcaaagaaatggaagatatcggcaaatcaaccggccttccgttagtacttcacggcggtacaggaattccgactgccgacattaaaaaatcaatctcacttggtacggctaaaatcaacgtaaacactgaaaaccaaatttcttctgcaaaagctgtccgcgaaacattggcagctaagccgaacgaatacgatcctcgtaaatatcttggacctgctcgtgaagcgatcaaagaaacggttatcggcaaaatgcgtgagttcggttcttcaaaccaagcttaatccaatgtaacatccataaaccgcctgacagcattgacaggcggttttatgtcttacctttagaaagcgcaatcatgttttacagttctgaaaatttattactggggaggctttccttatgttatttttcattgatacagcaaacattgacgagattaaagaagcttatgaacttggcgttcttgccggagttacgacaaaccctagtttagtggcgaaagaagctgacgtgtctttccatgacagacttcgtgagattacggaagtcgtgagcggatcagtaagcgcggaagtcatttccctgaatgctgaagaaatgattgaagaaggtaaagaacttgcgaaaatcgcgccgaatattacggtgaaaatcccgatgacgtctgaagggttaaaagccgtaaaagcgctgagcgacctgaacattaaaacaaacgtaacgctcattttcagcgccaaccaggcgcttttggcggcaagagccggggcgacttatgtatctccgttcttaggccgtctggatgacatcggccataacggtcttgaactgatttcagaaataagacagatttttgacattcatgacattgatactcaaatcatcgcagcttccatccgtcatgcgcagcacgtgactgaagccgctttacgcggtgcgcatatcggtacgatgccgctgaaagtcattcaccagctgacgaaacatccgttaacggataaaggcatcgagcaattcttggctgactggaataaataagggggaaaagggcggcaaaccggttgcatccgtttgccgcacccttatgttttcctgtttggcagcgggccttcagtatcaaagtgaagagtgtgtttccccggaatatgaacccggcgggcctctgtgcatcctgtgttaaaaatgccccgcaaagcttcgctattttcttcctgttattttataatgtccttgtattctttctcttcgaattggctacattttggacaagagctttatttgcagagacagaataaaatgccattttatttacgctccgcagctatcttcttatggaaggagactatcatggaaaagttgaatattgccggcggcgatccgttaaacggaaccgtacatatcagcggtgcgaaaaacagcgccgtcgcattgatacccgcaaccattctggcaaattccgaagtaacgatcgaagggcttccggagatctcagatattgaaacgctgcgtgacctgctgaaagaaatcggcggaaacgtccattttgaaaaaggagaaatggtcgttgacccttccccgatgatcagcatgccgcttcccaacggcaaagtgaaaaaactccgcgcttcctattacttaatgggcgcgatgctcggccgcttcaaacaggcggtcatcggactgccgggcggatgccatctcggtccgcggccgattgaccagcatatcaaagggtttgaggcgcttggagcggaagtcaccaatgaacaaggcgcgatttatctgcgcgccgaaaggctgagaggcgcacggatttatttagatgtcgtcagcgtcggagcgacgattaatatcatgcttgccgctgtactggctgaaggtaaaaccgtgatagaaaacgccgccaaggaacctgagattattgatgttgccacattgctcaccagcatgggcgcaaagatcaaaggtgcgggaaccaatgtaatcagaatcgacggcgtaaaagagctgcacggatgcaggcatacgatcattccggacagaattgaggcgggcacctttatgatcgccggcgccgcgatggggaaagaagtcattattgataatgtcataccgactcacctggagtctttaacggcgaagctcagggaaatgggtttttacattgagacgagtgacgatcagcttcttatgctcggcgggcagaagcagataaaaccggtcgacgtgaaaacgcttgtttacccgggattcccgactgatcttcagcagccgatgacatctctgttaacgagagccagcggcacgagcgtcgtaaccgacaccatctactcggcccgatttaaacatattgatgagctgagacggatgggggccaatatgaaagtggaaggcaggtcggccattatcaccggtccggccgagcttcagggcgcaaaagtaaaggcgagcgatctgcgtgcaggcgcttgtctggtcgtcgccgggctcatggctgacggcgtaaccgaaattaccggtcttgagcatttagaccgcggctacagcaatcttgagaaaaaactcgaaggtctgggcgccacaatctggcggcaaaggctgacggacgaagagatagaacagctccaaaattcatagaaatgcggacttttgagaggagatcgtgttgaaatggaaagaagcttatcgatggaattggttcgagtcactgaagcggcggctttagcatctgccagatggatgggccgcgggaaaaaagatgaagctgatgatgcggcgacaagcgcaatgcgtgacgtgtttgacacggtgccgatgaaaggcacggtcgtgatcggggaaggcgagatggatgaagcgccgatgctttacatcggcgaaaagcttggaaacggatacggcccgcgcgtcgatgtcgccgtcgatcctcttgaaggcacaaacatcgtagcgagcggcggctggaatgcgctgacggtgatcgcggtcgccgaccatggaacattgctgaacgccccggatatgtatatggaaaaaatcgcggtcggtcccgaagcggtaggctgcatcgatatcgaagcgcctgtcattgataacttaaaagccgttgcgaaagcgaaaaacaaagacattgaagatgtcgtggcaaccattttaaatcgtgacagacacgaaaaaatcatctctgaattgcgtgaggcgggcgccagaatcaaactgatcaacgacggtgatgtcgcgggcgccatcaatacggcctttgaccatacgggagtagacattctcttcggttcaggcggggctcctgaaggcgtgctgtctgccgttgcgttaaaagcgctcggcggcgaaatcatcggcaggcttctgccgcaaagtgcggaagagcaggcccgctgtgagcgaatgggccttgatgtatccaaagtgctccggatggaggaccttgtgagaggggatgacgccatttttgccgcaacgggtgtcacggacggagagctgctgaaaggcgttcagttcaaaggctccgtcggcacgactgaaagcctggtcatccgggcgaaatcaggaacggtccgattcgttgacggaagacacagcctgaagaaaaaaccaaatcttgtgatccggccataaatagagaaaagcgggacggaaagtcccgcttttcttttgcaaaaaagagtcaaccctatcatttatatgtcaaagcattatttaagttgaataattttttgaaatgaggtaaaaataaagagtgctgcgatttttctgtgtcattccttcttttgagtactgggaaattttcaaattctaccgcatacagacgatataaatattgatcttctcaagtttttgtcctcgcttccttcaaaactcattaagacattccttttttaaaaaagcgccgatcatgggtggaagtgttaccgatagaagttcctgaacgttttataaaagaatgtgctttggcggaatcatgcgaagcagccgatttgaatgaaaacagcaatacattgactatgaaaagcgtggtgtttttatgaaagacgtatctatttcctctttggaaaatatgaaattaaaagaactatatgaactggccagacattataaaatctcctactacagcaaactgactaaaaaagaattaatctttgccatcctgaaagccaacgccgagcaggaggatcttctgtttatggaaggcgtgctcgaaatcatccaatcggaaggattcggcttcctcagaccgattaattactcgccaagctcagaagacatctacatttctgcttcccagatccgccgctttgatttaagaaacggtgacaaagtatccggcaaggtgcgtccgccgaaagaaaacgaacgctattacggacttttgcacgttgaagcggtaaatggagacgatccggaatctgcgaaagagcgcgttcattttcctgcgctgactccgctttatccggaccgccaaatggtgcttgagacgaaaccgaactatctctcaacaagaattctcgatatgatggctcccgtcggtttcggccagcgcggtctgatcgtggcgccgccgaaagccggtaaaaccatgctgttaaaagaaatcgctaacagcattacgacaaatcagcctgacgctgaattgatcgtgctcttaattgatgaaagaccggaagaagtaacggatattgaacgttccgtagcgggcgatgtcgtcagctcgacgttcgatgaagtgccggaaaatcacattaaggtagcggagcttgtgcttgaacgggcgatgcgtctcgttgaacacaaaaaagacgttatcattctgatggacagcattacccgcctggcacgggcctacaacctcgttatcccgccaagcggacgtacgctttccggcgggattgacccggctgcgttccatcgtccgaagcgctttttcggtgccgcgagaaacattgaagagggcggcagcctgaccattttggcgacggcgctcgtagacacgggctcccggatggatgacgtcatctatgaagagtttaaaggaacgggcaacatggagcttcaccttgaccgttctcttgcggaaagacggattttcccggcgatcgatatccgccgctccggcacgcggaaggaagagctgctcgtgccgaaagagcatcttgaccgtctatgggcgatccgcaaatcgatgtctgattctccggacttcgcagagaagtttatgagaaaaatgaaaaaaacaaaaacgaatcaggaattcttcgatctgatcaaccaagaatggaagcaggcaaacctttcatcatcagcccgccgctgataaaaaatgtatttgcaaatgcagtaaatgactgatataattctctcatatgcgttccggattcgctccggaataataactctgtttccacacgggattcagggcggaaggagatggatacaatgaaagcaggaattcatcctaatttcaaaaaagcaacagttaaatgcgcttgcggaaatgaatttgaaacaggctcagtaaaagaagaggtacgcgttgagatttgctctgaatgccacccattctacactggacgtcaaaaattcgcttctgctgatggtcgtgttgatcgctttaacaaaaaatacggtcttaagtaataatagattttacaggcaggcaagaattgcttcttgcctgttttttatgtccataaacaggaaaaaaaggggagcggatagcctatgtacataatgaagcaaagcggatggcttgagctgatatgcggcagcatgttctctgggaaatcagaagagctgatccgcagagtgaaaagagcgacatatgcgaagcaggaggtcaaggtgttcaaacctgccattgataatcgctacagtgaggaggctgtcgtttctcacaacggcacatccatgacaagccacgtcatctcgtcttcggctgaaatatgggatcatatcagtgaaagcacggacgtcatcgcggtagatgaagtgcagtttttcggcgaatcaatcatcggcgatttatccttgcttgcggataaaggctatcgtgtcatcgcggccggacttgatatggatttccggggagagccgttcggtgtggtgccgaatctgatggcggttgccgaatcagtgacgaagctgcaggcggtctgctccgtttgcgggtcgccggcaagccgtacgcagcgtttgattgacgggaagcccgcttcctatgatgatccggtcattttagtcggcgcgtcggagtcatacgaagcgagatgcagacatcaccacgaagtgctgaaaaaacagactgataaataacccttttcatgaaaacatcggtaaaaaatccggtgtttttttgacggtttttcaaaaattgtagttaattaacttaaaaaagagtatgaaaaaattaagtaattttcatctcttgaattttcatttttacaggcataaaatgactaagtaatgtaaatagttatgagacattgttcgaataattgtcaaaaaaagatatagcagatcgcgatcacactagccaaaatgggtaattacttaactttgttaactatttgaagaaagaaggagattttcttgaataatattaaagtaacgaaggaaggcaacttagaaactactttaagaggaaaagaagttctatctatccctactttaaataaaggtgttgcgttttcagcagaagaaagaaaaagccttggattagacgggctgcttcctccgaccattctgtctcttgatgagcaggcaaaacgcgcatacgagcagtttcaagctcagccggaccgccttcgccaaaacgtgtatttgaatgatttgcaaaaccgtaacgaagttcttttctttaaattgcttcaaaaccatcttcgtgaaatgctgccggttgtttacacaccgactgtcggtgaagcgattcaagaatacagccatgagtacagaagacctcaagggatttacctttctatcgacaatgtagaaggaatcgaagaggcatttgaaaaccttcatgccactgccggagatattgatctgatcgttgcgacagactcagaaagcatcctcggaatcggtgactggggtgtaggcggtatcaacatcgccatcggtaaattagccgtatacacagctgctgccggtattgacccaagccgtgttattcctgtcgttcttgacgtcggtacgaacaacgaaaaacttctgaacgatcctttatacatcggtaaccgccatgaacgtatccaaggcgaacgttatgaagctttcattgacgcttatgtaaaagctgcgcttaaatatttccctaaagctcttcttcactgggaagaccttggaaacaaaaacgcgcgcaatatcatgaagaaatacaatcatgaaattcttacattcaacgatgacattcaaggaacaggcgcgattacgcttgcaggtgtgcttgcggctatgaagaaaacaggcgcgtctattaaagaccagcgtgtggttgtcttcggtgcgggatctgccggaatcggaatcgctgaccaaatccgcgacactatggtgcttgccggtctttctgaagaagaagccaacaaagcgttctacacaatggactacagaggcttgttaattgaaggtatggaaaacattcttgatttccaagagccgtacctgcgcacagctgaagaaattaaagattggaaacgcgatgaaaacggacaaattcctttcattgaagtgatccgtcaagcgaaaccgacaatcttaatcggtacatcaggccaaagcggcgcgttcagtgaagaaatcgtcaaagaaatggcaaaacacgttgagcgtccggtcatcatgccgatgtctaacccgacaccgcttgctgaagccgttcctagcgatctattcaaatggactgacggcaaagtgcttgtggcgacaggaagcccgtttgacaatgtagagtacaatggcgtttctcatgaaatcggacaatctaacaacgcattcgcgttccctggacttggtctcggttcaatcgttgtagaagcgaaagtgattactcctgcaatgtttgcggcaactgctgacgcaatcgcagaaagcgttgattttgaaacaccgggtgcaggccttctgccgagcatgagcgacttacaagaagtttcaattaaagttgcgatcgccgtagcggaaactgccattaaagaaggcgtggcaaaccgcattcctgagaatgtagaacaagccgttcttgatgcaatgtggaaaccgcaatataaacaagttatcgctaaataatttttacgattaattttacagtccgagggaaagcttttatgtaaaggctaaagtatacggacattaaggatttggaggagaatattttgagcttcttagatattttaatcctcctggcgccgatctttttcgtgatcgtgctgggatggttcgcaggtcgcttcggaagttatgacgcgaagtcagcaaaaggggtaagcaccttagttacgaagtacgcgcttccggcgcattttatcgcaagtattttaaccacttcaagaagtgcgtttttatcacaggttcctttaatgatcgctttgatcattgggattgtcggattctttatcgtcattttgttggtttgcaaatttatcttcaagtatgatttaacgaattcatctgtattttctttaaactctgcacagccgacatttgcatttatgggtattccggtactcggaagcttattcggagcaaacgaagtagcgattcctatcgccgttacgggtatcgtggttaacgccatccttgacccgcttgcgatcattatcgctacagtcggtgagtcatctaagaaacaagacagcgaaaacgagaacttctggaaaatgactggtaagtctattcttcacggtctttccgaaccgcttgcggctgcaccgcttatcagtatcatcctggtactctgcggtgtaacactccctggcttgggtgaaaaaatgcttgatcagctcggaagcacaacatcaggtgttgcactctttgccgtcggtgtaactgtcggtatccgcaacatcaagctcagtctgccggctttcggtatcgctttgttaaaagttgccgttcagcctgcgctgatgtacttgatcgctcttgcagtcggacttccggctgaccagatcactaaagcggtattgctcgtcgcattccctggatctgcggtagcggcgatgattgccacacgtttcgaaaaacaagaggaagaaactgcgtccgcgttcgtgatcagtgcgattttatctcttatctcactgccgatcatcattgcgctgactgcataatgaaaagctccctgtttcagggagcttttttgattagaattgaaatttaaaaggcgaaaatctcgttttttttctgggtttcttatgttctgaagaagcggctgtttctgagaggggagctgtctgggcaagttcctggatgcgggaggccaatgtctgcaattcggtattgaggtcgtcaatttcccgtctgtgctgaagaagctgataagacaccccttcatccgccttttgtttcagctggcgttcaagctcctctatccttgaaagcagatggttctcatcctgtttctctttcgtgagaatgtccagtttgcgctccagctctgccaacctttgttcagcgccgccattgattttcggacgctgcaaaatgaagcccgtccgttttttcggctgccggggcacttgaacgtccagaagggcagtgccttcagaaatttgccgtttgaccgatttcagcacatcaagatcctcaggtgtaaaggaataatgtccgagctcattccgttcagccggaagattcagctgcttgacccacctttgcaccgtttttgcggagacgccgagctctttcgcggccatgtttgtattcatgatcacatacctcctttttgctaggtattcgaccatgaggcggcgttcccttcatgttagacaaaacaagaaggaattcgccaaagaaagcggcatttcttcaaaaaacgttacgcttcatacaattcaagcggaagcttgtcgggatcgaagaaaaaggtaaaccgtttccccgtcagcggatcggttctgatcggttctgtgccgacgccctttttctttaactccctgacggctgcttcaagatcgtttacggtgaaggcgagatgccggagacccgcggcttccggtctggtcggccgttcgggcggatcgggaaaggaaaacaattcaatcgcatacgcgccgtccagcgccagatcgagtttataagattcccgttcctttcggtatgtttcttttataatgccgaaaccgagtatctcggtgtaaaaagctttcgacttttcataatcagagcatatgattgctatatggtggatggatttcagcatatccgcccctccttttttgcttcagtataacagaggcgaattgcttttgactggtgataagccctatactataatgagaatgttacgcacaggaaaacagaggtgaagaccgtgttagaccgtttacagtcaattgaacaacgatacgaaaaattaaatgagcttttaagtgatccggaagtggtcaacgatccgaaaaagcttagagaatattcgaaagagcaatctgatatacaagaaaccgttgaagtctatagacaatacagagacgcatcagaacagcttgccgatgcgaaagcgatgcttgaggaaaagcttgatgccgatatgagagaaatggtgaaggaagaaatctccgaactgcagggagagacggaaaccttatcagagcgtttgaaagtgctcctcatcccgaaagacccgaacgatgacaaaaacgtaatcatggagatccgcggagcagcgggaggagaagaagccgcgctgtttgcgggaaatctctacagaatgtactcccgttacgctgaaatccaaggctggaagactgaagtcatggaagcaaacgtgaccggaacgggcggttacaaagaaatcatctttatgattacgggaaaaggcgcatactccaagctgaagtatgaaaatggcgcgcaccgcgtacagcgtgtgccggaaacggaatcaggcggccgtattcatacatccacggcgacggtggcgtgtcttcctgaagcggaagaagtagaagtggacatccacgaaaaagacatccgcgtcgatacattcgcatcaagcggaccgggcggacaaagcgtaaatacgacgatgtcggccgtacgcctgacgcatttaccgaccggtgtcgtcgtatcctgtcaggatgaaaaatctcagattaaaaataaagaaaaagcgatgaaggtgctccgcgccagaatctatgacaaattccagcaggaagctcaggctgaatatgatcagacccgtaaatcagccgtcggatcaggcgaccgttccgagcgtatccgcacatacaatttcccgcaaaaccgtgtgacggatcaccgtatcggcctgacgattcaaaagctggatcaaatcctggaaggcaagcttgatgaagtggttgaagcgttaatcgtagaagaccagtcaagcaagctccagcaggcggaaaattaagatgaagaccgtttttgaagccctaagctgggcttcttcttatttaaccgaagcgggaagagaaaaaaacgcggccgagctgctgctgttaaatgataccggaatggatcggagcaagcttctcgcaagtctgcaggagcccgtcggcgaggacgagctttaccgattcagacggcatgtggaaatgcataaagaaggcgttccgattcaatatattatcgggaaagaacagttttacggcagagaattctttgtgaatgacgatgttctcattccgcgtccggaaacggaagaagtcgtctttcatctgctggacagacagaagcgggtgttttctgagggagaacgcctgaacgtcattgatatcggtacggggagcggagccattgcggtgacgctcgcgcttgaatgcggacatttttcagtatcggcttcggacatttcaaaagaagcgcttcaggtggcggaaagaaatgcgcaaaacctcggagcggacgtccgctttttgcagggagatctgttaactccttttatttcatcaggaataaaagcggatattattgtttccaatccgccgtatatttctgaagaagaaatggcggatttgtcggatatcgtccgtttccatgagccgcttcatgcacttacggacggcggtgacggtttgaaattctacaagcggtttatggaggagctgcctcttgtcatgaaagataaagcgcttgtcgtctttgaaatcggatataatcagggaaaagccgtgaaagacctgttccgtcattcctttccgaatgcggaagtggaagtcgtacaggacatcaacggaaaagacagaaccgtatccgcggtcatcacatcatgaaaaaagcccgccggtgacgcacacggcgggcttttgttacaatggaaagaaaatgaaaggggcatccgccttgaaaaaagcgttcgccttcggatgtatactcgccgccgcagcttatgcggctggatttgtcctgccgtttggctttgacatcattctcggcgccgttacggctgttcttatcgtcgcagcggtcatcgtttccgggctggccgtaagcggagcggagcagcgggccaattatcattctgaaacagaagaaggacggcgcgcccgtttaaagatggccgccgttttcttttgcgccgctctcccttcagccggctgtctgctgattacgcttctgtagccggattttgtctttgcagcaatacggaatcccatacccaatagacgacggctgttaaaaccgcaaagatataaaaggctgaattagaaaacagagattggcctgacggctgcaaaagaccgaagatgatcccgtttgcaatgaacgacacccccaaataataaagaaaatacagcggatgaaatctcttcggctttttattcagaaagtattgaagcggcagcgcaaaaatcaaataaggaaacaaaaaataaaacgccatcgaaatgaaagccgcgataatgaattgatgaacatacaaaatagaataaatgacagacatacatgccgccgacagcagcacggtgtaattatatttcatctgaaaacctcctatcaaaataatatcgtaccatattttgaatctgtcaatgcagattatcagcttgctagatttttttcttcccgccggtttaaaccttttccgtcatgtccataatgggactagataaaaaaagcacggagaggaacggtggggaccgatgaaacagacaatgatgatctgcatatatatttttcttttattatcaggagcgcttgcgggtttgacaaaagaagaaacggcgcgggcatcagccgatgagcccgtcgtcataccggatgaagcgatccggctcaggattttggccaacagtgataacgatgaggatcaaaagctcaagcgccagatcagagatgctgtaaacaagcaaatcacggactgggtgaaagatatcacttccattgaagaagcgcggcggctcattcgttcgaagcttcctgaaattaaagaaatcgccaaacaaacgatgaaagaaaagggtgcgcatcaatccgtttcagttcaattcaataaaatctcgtttccgacaaagctgtacggcaatatggtctatccggccggaaaatatgaagccattttaattacactcggcaatggcgagggcgccaactggtggtgcgtcttgtttccgccgctgtgcttccttgatttctcaaacggcgaagcggtgaaagatcaggaagacggcggacagaagcaggaagaaacgcagaaacagacagaaaaagtgctggatgacgtaaaagcaaaggccgataaagcgaagaaagaaaataaagatgacgatgataccgaagtgaagtttttcctcgtcgattggatttcagatctattttcctgaagcaaaaggcataaatccggattcgattcatagattggaagaaagagttgatcgaaacggagggaaatatatgttttatcagctgagagtggcaagagatcaagatacggaggcgctggaggcctttttgaaaaagtctgatacggcacatgcggaaatcgatcagcagatcagccggtttatcgtgctggaagacagcgaaaaaaagattgccgcctgtctcgggatcgaaaaattcagcggcggaaaagggcttctccgttcactcgtcatgtcggacaggctgaatcaaagccatatcgttacactgtttcaaagtatggatgtgctgtgcaaaaaacatgaaattcaagatgtctacttagtcgccaatcagccctcatctgctgagtttctgaatgtgatgggatttgaagcgtgcgccgatgcgcctgaggaactgtatacgtccgaacatttccgcaactcgttatgcacagaaggttcgtttttaatggtgaaaacctctgcctgatctaacttatacacaaggttatccacttattaaaaagtgttgtccacagtttgtggataacgcttgttttattaaaggacatcttttatactttcaaaaggaatacacgagagaaaataaagttttaccgctttaaaataaggagtttggttatacatgaaaacaagaagatggtttgtggattgttccgcagaattatccacaaccgatccccaaattacacaagccgcggaattgctccggcagaatgaggttgtggcttttccgacagaaaccgtttacggactgggcgctaacgctgaaaatacggaagccgtaacgaaaatatatgaggcgaaaggaaggccgagcgataacccgctgattgtgcatatatcccatatcagccagcttgatcgttttatcagccatattcctgagacggcgaaaaagcttatggagctattctggccgggggcgctgacccttgtcctgccgtgtaagcccggtgtgctgtcaccccgtgtcaccgcgggactggagacggtagcggtcagaatgcctgatcatccggcagcattagccctcatcagctcggccggactgccgatcgccgcgccgagcgccaatttatcaggaaaaccgagcccgacgaaggccgagcatgtagctcatgatttaaacggccgtattgccggtattgtggacggcggcgcgacgggaatcggagtggaatcaaccgttctgtcctgtacggggaaacagcccgtgctgcttcgtccgggcggcgtgacaaaagagcagattgaatccgccgccggtccggttcttgtggataaaggactgaccgaagaagatgaggttcctatttctcccggtatgaaatatacacattacgcgccttctgcgccgatggctattgccgacggcggcgcccggagaattcaagaactggcagacgcatataaaagccggggaaaacgaatcggcattttgacaacagaagagaacgccgatagttaccaggctgattatatcaaggtctgcggcagacgcgccgaccttgaaacagtggcgtccgccttatacgatgcgctccgcagctttgatgaagcggaagtggatatgattatttctgagtcctttccggataccggagtggggctcgccgttatgaacaggctgatgaaagccgcaggcggcaccgttatccattaacttgttctaccccttatcggacatgcataagctaaacaagcgggcacgtccaagggggtttttattcatgtcgaatctattcatcggggaacttgtctccttaagcatcatggcatttgctttggggacggatgccttttccgtcgggctcggaatgggaatgattcagctgaagaaaaaacagatttttcatataggggttgtcatcgggctgtttcatgtcatgatgccgcttgtaggaatggcggccgggcatctgctgtccggttttctggggatgctcgccgtttacatcggcggatctcttcttttcattttaggggtgcagatgatgatcgccgcgtttaaacaatcggacgggccgctcatatctccggcaggctcgggactgttgctgtttgcggtcggtgtcagtctggacagcttttctgtcgggctcagtctcgggatgaacggctccaatccgtttctggccgttacgctgttcggggtcttcagcaccgttttaacatgggcgggccttttggcgggaagaaaggtgcagtcatggctcggctcctacagcgaagcgcttggcggagccattttgatcggattcgggctgaaactgcttttaccgatataagatacgtaaaaaaagaaacgaagatgccgtttcttttttcttcatttataataggtagtaagaggtgacggacatgaaaataatctttgtttgtacaggcaatacgtgccgcagtcccatggctgaggctctttttaaatccatagcagaaacgaaagggctggatgtcagcgtaagctcggccggcgtattcgcgtctccgcacggaaaagcgtcggctcatgccgtagaagcgctgtttgaaaaacggatcgccctcaatcacagttcatctcccttatcggaagaacatatcgagacggccgatctggtgctggcgatgaccgaacagcataaacagctgattgaaggccgatatcaaaacagtcagggcaaagtttttaccattaaagaatacgtgacgggggaaagcggcgatatctctgacccgttcggcggtccgcttgatgtttataaacagacgcgggacgaactggaggagctgctgacccttttggctgatcaattgcttgacgggaaaagcaagtaatctgtcagaaaatctgcaaacaggtcatttgcaaaacgaatgtgaaagagtagaatgaaatcaacggatttcgtaataaaaaggacaagcacactgggctgtcttcgcccagccacacctaggaggtaaatgaatgaaagtagctattgcgtcagatcacggcggcgtccatatccgcgaagaaataaaaagtcttttggatgaattgcagattgaatacattgatatgggctgtgaatgcggcgccggctctgtcgattattcagactacgcttttccggtagcggaaaaagtggtgaacggcgaagctgacaggggaattttaatttgcggcacaggcatcggcatgagcatctccgcaaataaggtaaagggcatacgctgtgcgcttgcccatgacaccttcagcgcaaaagcgacgcgtgaacacaatgacacgaatgttcttgcgatgggcgaacgcgtcatcggcccggggctggcgcgcgaaatcgcaaaagtctggctgacgactgaatttacgggcggccgccacgaacggcggatcggcaaaatcgcagattacgaagaaaaaaatctgtaagaggtgctggacaatggaagagatgaagcaaaaatggacggacatgctgactgagtttcaagagcaggcaggactgacggacggcagtctgctggtggtcgggtgcagtacaagtgaagccgccggaagccggatcggcaccgccggaagcggggattgggctgaattgatatacggcggacttaaccggtttaaggaaaaaacgggtgtgcatcttgcttttcaatgctgcgagcatttaaacagggcgcttgtcattgaagcggaaacggccgagcggttcaggctccccattgtttcagccgtccccgtcccgaaagcgggcggagcgatggcctcttatgcataccggcagatgcgttctccagtgctcgctgaatcgattcaggctgacgccgggattgacatcggtgatacgttcatcggcatgcatctgaaacccgttgccgtccctgtccggatatcgagccgtgagcttggagaagcacatgtgacgatggcccggacaagaccgaagctgataggcggaattcgcgccgtatatgaatgcgaatgatgaaaatacttttcctctataatgttcgtgttttctaattaaattttgtgatttttttaaataagctgttacattcacctgaaaaaccatgtacaataaggtggtaaaaataaagaacaggaaacggataggagaggatctcgctgatgaaacatttacctgtacaagataaacaagtgtttaacgccatcaaagatgagcgtaagcgtcaacagactaagatcgaattaattgcttctgaaaacttcgtgacggaagcggtaatggaagcacaaggctctgttttaacaaacaaatatgctgaaggctaccccggcaaacgctactacggcggctgtgagcatgttgatgtcgttgaggacatcgcccgcgaccgcgcgaaagagattttcggagctgagcatgtaaacgttcagccgcactcaggcgctcaggcgaacatggctgtttacttcacgattttagagcacggcgacacggtgctcgggatgaacctctcccacggcggccacttaacacacggaagcccggttaatttcagcggcgttcaatacaactttgtagaatacggtgtcgataaagacacgcaatatatagattatgaagatgtgcgtgaaaaagcgctggcgcataagccgaaactcatcgttgccggagcgagcgcatacccccgcacgatcgactttaaaaaattccgtgaaatcgctgatgaagtcggcgcttacttcatggtagacatggcgcatatcgcgggtcttgtcgcagccggccttcatccgaatccggttccttacgctgactttgtaacgacaacgactcacaaaacacttcgcggaccccgcggaggaatgatcctttgccgtgaagagttcggcaagaagattgataaatccattttcccgggaatccaaggcggaccgcttatgcatgtcatcgcggcaaaagccgtttctttcggagaagtgcttgaagatgatttcaaaacatatgcgcaaaacgtcatctcgaacgcgaagcgcctggctgagtctctgaacaaagagggtattcagctcgtatcaggcggaacggataaccaccttgtgcttgtcgacctccgttctctcggactgaccggaaaagtcgctgaacacgttcttgatgaaatcggcattacatctaataaaaacgcgatcccttacgatccggaaaaaccgttcgtcacaagcggaatccgtctcggtacggcggctgtgacaagccgcggctttgacggtgacgcgcttgaagaagtcggcgccatcatcggcctcgcgctgaaaaatcatgaagacgaagcaaaacttgaagaagcgaaacagcgcgtatctgccttgactgaaaagtttcctttatataaagaactggactattaataaggaagaaacccgccggaaccttaatccggcgggtttttttatgattttcttgaaactgtttgtctttttctgtagaatcaatagaagtgtgaaaaagtcactcggacaacaaaaaaggagctgaacacagtatgggaaaggtttacgtatttgatcatcctttaatccagcataagctgacatatattcggaatgaaaatacaggcacaaaggatttcagagaccttgtggatgaagtcgcatcactgatggcgtttgaaattacacgtgatcttcctcttaaagaagtggaagtgaaaacacctgttcaaacagcgacatccaaagtgatttcagggaagaaactcggtatcgtgccgatcctgagagcgggtctcggaatggttgacggcatgctgaaattaatcccggccgctaaagtgggacatgtcggattataccgtgatccggaaaccttaaaaccggtggaatactatgtcaagcttccttctgatgtagaagaacgcgaatttattgtcgtggatccgatgcttgctacgggaggctctgcggtggaagcgatcaacagcctgaaaaagcgcggcgcgagaaacattcgttttatgtgtcttgtagcggctccggaaggcgtggaagagctgcagaaacatcattctgacgttgatatttatatcgccgcccttgatgaaaaactgaatgaaaaaggctatatcgttccgggcctcggtgacgcgggtgacagactgtacggaaccaaataaatcggaaaacctcattcaggggttttcttttttttatccagattttagctgaatgggcagaggtcatacatttataggtgaatttgtgaacattctgtgtatgcttccggtataaaaagttttttaactttaaacagattgacacatgttaggggctattgtatgctaaacgagggtattatgagaaggttttcattcctttcatttctagtatccatcctcattttaaatcctccaaaaaaacccgttatatgaggatttatctaagcgaatgaaacagcatcccgtagcatcaggaggatgagtggttttttcgaacaggccgttttgcggacaaaaaaggccttctgcaagggttaaccgcatgttttgccgtatccaggaattatattacattttcatcaggagacagatagttgatggacgatcccaatcttacattcagcagacaacggagatatgtatttgtaatcttagcaatctatttgctgggatatggtcttacggcgtataaaactgtttttttaggcctctttttgggaactgttttcagtttgtttaatttgtggctcttgaccagaagaatgaatgcttttgacaaggccgtggcgaaaggaaagtccatacgatcactcgggagcgcagcgcgttggtgcaatgcgatacttgcgatggctgtcgcctttaaatatcccgataaagtcagtgtggcaagtgtgattattggattaatgacaatttatcccgtcattatgatagattccattattcagctcaaacgttcatcaatggaagagaggtgaaaacccattgaatcacgattacagaactattgatttgtttggtcttacttttaatctgacaaacattctgatgattactgtggcaagtgtgattgtgctgctgattgcgattcttactacaagaacgctgtccatccgtccgggaaaagcccagaacttcatggaatggattgttgattttgtccgcaatattataggcagtacaatggatttaaaaacaggggctaacttcttggcgcttggtgtaaccttgctgatgtacatatttgtatcaaatatgctagggctgccgttttctgtaacggtcggacacgagctttggtggaaatcaccgacggctgatccggctattactctgactctagccgttatggttgtgtcgttaacgcactattacggcgtgaagatgaaaggtttgaaggaatactctaaggattacctcagaccggttccgcttatgttcccgatgaagatcattgaggagtttgcgaatacgctgacactcggacttcgtctttacggtaacattttcgccggggaaattcttcttggcctgcttgcgaatctggcgacgaatttctactcaaacagtttctttctcggtttggtcggcacagtcggagccattattccgatgcttgcatggcaggcattcagcttgttcatcggtaccatccaggcatttatctttacgatgctgacgatggtgtacatgtcacacaaaatcagtcatgatcattaaaatcatatatccattcggataacattttaaaggaggaactttttcatgaatttaatagcagctgcaattgcaatcggtttaggtgcacttggtgcaggtattggtaacggtctgatcgtttcacgtacggtagagggaatcgcccgtcagccggaagcaggaaaagaacttagaactcttatgttcatgggtatcgcattggttgaggcccttccgattatcgctgtcgttatcgcgttcttagcgttctttggctaagcaaaaaagccttatatgaactaaaaatggcgaagatcactctaagagaaccttcgccattgctttatgtctgataagcaggccgtcccgaaacggctttttatcagcagagaaaacctgcagaagggagttgccgtagtagatgtctcaattacctcttgaattaggactgtcgtttaacggcggagatatcctattccaattgttagctatgttagttttattagcgcttctcaagaaattcgctctgggaccgctattaaatataatgaaacagcgtgaagatcatatcgccggcgaaattacgtccgctgaagaaagaaataaagaagcgcagaagctgattgaagagcagcgcgttcttttaaaagaagcgaaacaggaatcacaatcactcattgaaaatgcgaaaaaactgggtgaaaagcagaaggaagacattatccaggctgcacgcgccgagtctgaaagattgaaagaagcggcgagaaccgaaattgtcaaagaaaaagaacaagcggtttccgcacttcgcgagcaagtcgcatcactttctgtcttaatcgcatcgaaagtgattgaaaaagagcttgatgaacaagcccaggaacaactgattcaggactatcttaaagaggtaggagaaagccgatgagtggatctgctgtctctaaacgatacgcgtcagcgcttttcgacattgccgttgagacttctcaaatcaatgaaatcgaagaagagcttaccgtactaaaagaagtgttccgaaacgaagccggattacaggaagtgctaagccatccgaaggtatcggccgctaagaaaaaagagctgattcagcaatcgttcggcgcactgtctgagtctgtgctgcatacgatttttcttctgattgaccgccgccggtcttcgattgtgcctgatctcacagacgagtttatcaaacttgccaatcaggcccgtcagacagaggacgcggttgtttattcagtaaagccgctttcagaagcggaaatgttatcattgtctcaagtgtttgcaaaaaaagccggaatcgcttcgctcagaatcagaaatgaagtgcagacggatttaataggcggcattaaagtccgcattggaaaccggatttatgacggaagcgtaagcggaaagcttgagcgcatggaacgtcaacttgccggaggaaatcgatagaaggggtgaaacctaagtgagcatcaaagctgaagagattagcacgctgataaagcagcaaattcaaaattaccaatctgaaattgaagttcatgacgtaggtacagtcatccaagtcggagacggtattgcgcgtgtacacggccttgacaattgtatggccggtgaacttgttgagttttcaaacggcgttttgggtatggctcaaaaccttgaagaatccaacgtaggtatcgttatcttaggaccttacagagatatccgcgaaggtgatgaggtcaaaagaacgggccgcatcatggaagttcctgtaggtgaagaattaatcggacgtatcgtcaacccgctcggacagccggtagacggactgggtccgattctgacaagcaaaacacgtccgatcgaaagccaggctccaggcgtaatggaccgtaaatcggtacatgagccgctgcaaacgggtatcaaagcgatcgacgcgttaattccgatcggccgcggacagcgtgaactgattatcggggatcgtcagacaggtaaaacatctgttgcgattgatacaatcttaaaccaaaaagatcaagacatgatctgtgtgtacgtagcgatcggccaaaaagaatctacagtacgcggcgtggtggaaacacttcgtaagcacggcgcgcttgattacacgattgtcgtgacggcatccgcttcacagccggctccgcttctttaccttgcaccgtatgcaggggtgacaatgggtgaagaattcatgtacaacggcaagcacgttctcgtcgtatatgatgatttatccaaacaagcggccgcttaccgtgagctgtcattgcttcttcgccgtccgccgggccgtgaagcattccctggggatgtattctatcttcactcccgtctgcttgagcgcgcagccaagctgagtgacgctaaaggcgcaggatcaattacggcgctgccgttcgtcgaaacacaagcaggagatatctccgcttatatcccgacaaacgtcatttccattactgacggacagattttccttcaatccgatctattcttctcaggcgtgcgtcctgcgatcaatgccggattatccgtatcccgtgtcggcgggtcagcccaaatcaaagcgatgaaaaaggtagctggaacattgcgtcttgaccttgcttcataccgtgaacttgaagcattcgcccaattcggatctgatcttgaccaggcgactcaggcgaaattgaaccgcggtgcgcgtacagttgaagtgctgaagcaagacttgaataagccgcttccggttgaaaaacaggtagccattctttatgcgctgacaaaaggatatcttgatgatattccggttgcggatatcagacgttttgaagaagagtactacatgtaccttgatcaaaaccataaagatctgcttgacggcattgcgaaaacaggaaaccttcctgctgatgaagacttcaaagctgcaatcgaaggcttcaaacgcacatttgcaccaagcaactaacccttagaagatgagagaaaaaggttctctttttctctctttttacgcaaatgaagaataaaggtggtgaaatctttggcctcattacgcgatattaagtcaaggatcacgtcaacgaaaaaaacaagccagattacaaaagccatgcagatggtatccgctgcgaagctgaaccgtgcggaaaccaacgcgaagtcatttgctccgtatatggataagatccaggaggttgtgtttaacgtcggaaaaggcgcgaaaaacgcgaaacacccgatgcttgtctcaagagaagtgaaaaagacggcgtatctcgtcattacgtctgaccgcgggcttgcgggtgcgtttaacagttcggttttgcgaaacgcttaccgcaccattcaagaacgccatcagtctaaagatgaatacacggtgattgcaatcggcagagtcggccgcgatttcttcaaaaaacgggagatgccgattttgtctgagttagtggggcttggcgacgaggtcacttttgctcagattaaagatttgacccgtcagacggttcaaatgtttatcgacggcgcttttgatgaactgcatttggtgtataaccatttcgtcagtgcgatttcacaggaagtgacggagaaaaaagtgctgcctttaacggatttcggaacgagcggcgggaagcgcacggcttcttacgagttcgaaccggatgaagaagaggtgctcgaagtgctgcttcctcaatatgcggaaagcttaatttacggcgcgcttcttgacagtaaagcaagtgaacacgctgcgagaatgacagcaatgaaaaatgcgactgataatgcgaaagaactcattgattcactttcgctttcatataaccgcgcgcgtcaagcggcgattacacaagaaattaccgaaattgtcggcggtgcagccgctttagaatagaaagattttgtcaggagggatagcgatgaagaaaggacgcgtaagtcaggtgcttggaccggttgtcgacgtacgtttcgaggacggccacttgcctgcgatttataatgcgattaaagtttcacagccagctacaggcgaaaatgaagtaggcatcgacctaacgctagaggttgctcttcatttaggcgatgatacagtccgtacaattgccatggcatctacggacggaattcagcgcggaatggaagccgttgatacaggtgcgccgatttccgttccagtcggtgatgtgactctcggacgcgtatttaacgtactgggagataaaattgatttaaatgaaccgctgcctgcggatgctcaaaaggacccgatccacagatcagctccttcattcgatgagctttcaactgaggttgaaattcttgaaacggggattaaggttgttgacctgctcgctccttacatcaagggcggtaaaatcggattgttcggcggcgccggcgtaggtaaaaccgtattaatccaggaattaatcaacaacatcgcgcaagagcacggcggtatttccgtattcgccggtgtaggagagcgtactcgtgaagggaacgaccttttctacgaaatgagcgattcaggcgttatcaagaaaacagccatggtcttcggacagatgaacgagccgccgggcgcacgtatgcgtgtagcactgacgggtcttacaatggctgagcatttccgtgataaacaaggacaggacgtactgttctttatcgataacattttccgtttcacacaagcgggttcagaggtttccgcgcttctcggccgtatgccttctgcggttggttatcagccgacgcttgcgacagaaatgggtcagcttcaagagcgtattacgtctacaaacgttggttcagttacatctatccaggcgatctacgtgcctgccgatgactacactgacccggctccggcgacaacgttcgctcacttggatgcaacgactaaccttgagcgtaaattaactgaaatgggtatctaccctgcggttgatccgctggcttccacttcccgcgcgcttgctccggaaattgtcggagaagagcattatgcggtggcgcgtgaagttcagtcaacgcttcagcgttacaaagaacttcaggatattatcgcgattctcggtatggacgaattaggtgaagaagacaagcttgtcgttcaccgcgcacgccgtatccagttcttcctttctcaaaacttccacgtagctgagcagtttacgggacaaaagggttcttacgtgcctgttaaagaaacggtacgaggctttaaagaaatcctttccggtaaatatgaccatcttccggaagatgcattccgtcttgtgggacgcattgaagaagtcattgagaatgcaaaagagatgggtgtagaagtttaatctggtcctaggagggtaaaagcatgaagaccgttaaagtcaatatcgttactcccgacggcccagtatatgatgctgatattgaaatggtgagtgtaagagccgagagcggtgatctcggtatcctgcctggccatattccgaccgtggctccgcttaaaatcggcgctgtccgccttaaaaaagacgggcagaccgaattggcggctgtcagcggcggatttttagaagtccgtcctgatcaggtcactatccttgcacaagccgctgaaacagcggaaagcattgataaagagcgcgcccttgctgcgaaaaagcgggcggaagaccgtttgaacaaacgatcagatgatactgacattcgtcgggctgagcttgcgttacagcgggctgtaaacagattggatgttgcaggaaactaaaaaagaatccttctcggctgtctgagaaggattctttttctatattaacgcataagagattcatagacgccgataagcggatgatcctcttctttttgcagatataaatgttcgcagcagttgtcggtgtgccacgttttgtttcctctccgcacacccgtcgtataagcgccgtccgtatacggataaggtttgacgacccattcggcatcgtcatgatgtctgatggcgcaatcgatgacatacacactgagcattttctcaaattcgtcaatcggcaggttccaatccgccaaaagcagctcttttatgctgcggaagtaaagagcttccactgccagcaggctgccgggtgaataatcaagagaaatgttgaaaaactgacataattctttcagttcctctgtttgagactgtctataatcatagtagaatgctatcgcttcccactcgtggtcaaatacgggaagtgtttctccatactgcttttccggatgaaaaaaggaatgattcatattcccatctcctttccaaaaaagtatatcatgccggagaacggacatttaagcggggattgcccctaattttggataaaaattctgatgtaaaaatgatcatctttctctcttcttcttatataataagagaggatatgaggggcggaaaaaatgaaaggagatggaatttgtgaatgtattggggcagcaggccgcaatcagcatcctggttcacctggtatgcattgcggtgacatggtgggcgcttcaggccgtcaactttgatccgctgatccgaaaaggaaaaatagtgcaggcgaggctgctgatcattcttcttaccattgcgatcggtacggcagtcgccaacttctttttagattatcttacctattcgaaacagcttccatacttattttaagatgtttcgtctgttgaaatgaagggaatcgctgggtgagaaaccaatttttcttcacccgcttggcgagttttgacgaagttttccatgtattgctttccccggctccggcaaaaatgggagtaagggggagagatcgatatgaagaaaaaaagagcaggccgtatcatcttgttttttgtttttttaagcgccttaatagcggtatttcattccattcatgcaagtgagctgtctccgcttgcccagattgccgaaggaatggagcggcagcaggtcactgtggatgaatggacgcttcatgcgaaaaaaaatctgaacctgtcactgagtgaatttgatgacaaggtaaaagaactgaagacgcagtatccgcaatatcattgggaatccgcgcgggaagataaaatcgtaaaggccgtcggcacgtattctgacaaaaaaaatcacacaacttttaaactgcagctcgtcactaccctcaaaaaccagaacccaacttcgtatttattatatgagcaaatgagcccggagcaaccggaaaactggaatgatacatatgaacagtttgaacggcaggcacatgacatatttcaaaataaagtatttatttttacttgtctaaagggtcatttaaatgataatatgagtattgttttgcaaaaaaaagcagaacagctcatgaaagaatttgaagcaagtccagttgaacatgtagttgagcctcatttcgtttctgtttctgcatttacatataagtggacagattacatcatgacatcgaaacataagatgaatgtgcaagttgcgcttagaagtgcgggaatgggcggaaaacataccgttacggttggcacaccaatcgtgacaactgaatattaatatagagaatatagggacgcggaggggaataccttggaaaaaatcatcgtccgcggcggtcagaagttaaacggcacagtgaaagttgaaggagcaaaaaatgccgttttaccagttatcgctgcatctttattagcaagtgaagaaaaaagcgtaatatgtgatgtacctacgctctccgatgtatatacaattaatgaagtgttgcgtcatttaggagcagatgtgcattttgagaataatgaagttaccgtaaacgcttcttacgctttagaaacagaagcaccttttgaatatgtgcgcaaaatgcgcgcgtcagtgcttgttatgggccctctgttagctcgtacgggtcattcaagagtagcgcttccgggcggttgcgcaatcggctcaagaccgattgatcagcatttaaaaggctttgaagcaatgggtgcaaaaatcaaagtaggcaacggctttattgaagcagaagtggaaggccgtctgcagggcgcaaaaatctatttagatttcccaagtgtgggtgcgacagaaaacttgattatggcagctgctttagctgaaggaacaacaacgcttgaaaacgtggcaaaagagcctgaaatcgttgacttagcgaactatatcaatgcgatgggcggaaaaatccgcggagccggcacaggcaccattaaaattgaaggtgtcgagaagcttcgcggcgtaagacacaacatcattcctgaccgtattgaagcgggtactttcatggtggctgcggctatcacggaaggaaatgtattagtcaaaggtgcggttcctgagcatcttacgtctttaattgcgaaaatggaagaaatgggagtcaaaattacggatgaaggagaaggccttcgtgtcatcggtcctgcccagctgaagccgatcgacattaaaacgatgcctcacccaggattcccgactgatatgcagtcgcaaatgatggcgctgcttctccgtgcgagcggaacaagcatgattactgaaactgtgtttgaaaaccgttttatgcatgctgaagaattccgccggatgaatggcgacattaaaattgaaggacgttctgtgatcattaacggtcctgtacagctgcaaggcgcagaagttgccgctacggacctgcgtgcgggcgcggcgctgattcttgcgggattagtggctgaaggtcatacacgcgtcacggaactgaagcacttggatcgcggttatgtgaatttccataaaaaacttgcggctctcggcgctgacatcgagcgtgtcgttgatgaaacggccgctgaacaagaaagcaaagaagtcgtaactgacctaaacgcataatggctgtaaaaacagtatgtcaatctggcatactgtttttttatggtttatcatcattattatgctctgattttcaaaaaagaatacgtttttcgcgtgaaaaatggaataagattctgtccaaaaggaagtcatattagcttgtccctgcccataagatgaagtagagtcgaatcccaagcaggaggcagctgatatatgaaaccgattgtatttctactatccgggctgtgtatacttattcttcttgttcccaccattctcgttcttccgtttcaggcggaaaaaggagcagccgtaaacagagagcccggacacaaaacaacacacaccacacgagaaacaaaaggagcagaaacattgaaagaatcacctgtatccattccggtttatcggacatccaatcattctgtagagaacattccgcttgaagagtacgtgatcggtgtcgtggcttccgaaatgcccgcaacctttaaaccggaagccttaaaagcccaggcgctcgccgcccggacattcatcgtcagattgatggttgctgactcagccgttcaggcgccgaaaggatcactggtggacgatacgcaaatgttccaagtctatcaaagcaaaagccagctgaaaaaagaatggggttctaagtacgcacacaacctcaagaaaatcacaaacgcggtcgcaggcacgcaaggaaagattttaacgtacgacaacaagccgattgaggcatctttcttctctacgagcaacgggtatacggaaaatgcggaagcctattggacaagcgccattccttatttaaagagcgtgaaaagtccgtgggataagcaatcgccgaaatatcttgccacccagaccttcagtgtgccggagtttcagcaaaagctcggcgtacagctctcgggacaaaacacggtagggcagattacagccagaacgccgggccatcaagtggcgacggccgtcataaacggcaaaaagctgaagggaagagacatccgggaaaaactcggactccgttctgccgactttgaatggaaacggaacggcggcagcatcaccattacgacaaaaggattcggccacggcgtcggcatgagccagtacggggccaattacatggcggagcaggggaaatccgtggcggacatcgtcaagcattattatcagggagtggacatatccgaagcagattcatttttaaacaaatatatggcgaaaaaataggcgctttcatgagcgtctgttttttttgaaaactattccataaacggtaaagcaaccaacagactcatataacgaaagcctaaaggctgacaaatgccgtctgaaggctgagcgccgggtgaaaatcactgataaaaatgccgtatctatgtgaatatacgcaaaaataatgaggaacgccgtcctatttatttcccttttcatctcatttacgataaatattgttcggcgttgaacgtaaatctattgaaaaggggaagaagcaatgaaaaaaacactttcactcataatcatgctcggattgatgctgactgctgcatctcctgcttttgctgccgagaatgcaaacgagaagacatttttatttaaaaacaatatcgccattctgcttgatgcgagcggcagtatggcgaaacggattgacggcgtttctaaatacaatatggcaaaagatgaaatcgtccgttttgcagatcgaattaagtctacatcacaggtcagaatgacggttttcggttcggaaggcaataataaaaactccggaaaagttcaatcttgtgaatccattcgcggtgtatacggattccaaaagtttgacagacagagcttcctcaactctctgaacggaatcgggcctacgggctggacaccgattgcaaaagcattagaagatgcgaaggcttcttttaacggcgttcataaattcggctttaaatccgtttacctgttgacggacggtgaggagacatgcggcggagatcctattaagacagcgaaagaacttcgcaaacatcatattaaagtcaacgtgatcggctttgactttaaagaaggcttcaacggacagcttcacgcaattgccggtgcgggcggaggaaaatattacgaagctcacagccaaaaggatatgaaccgcatctttacgatggaagcgagttcattagcgaaataagaaaaggtgccgtttagcggcccttttttttatttttatttaacaaaaatttcaagaaaagatgaagagaaaactgtaaaaagaatcagattccggacttatattacaaaaagggcgaaaaaggcattaaatctgtcatcatttatccaatctttttaggatgatgcgcataattctgttcatttttaacggcgtacagccgcttatacaaaaggaatcccgccctatatctttttgcatactcctcatctagcatagagaagagccgggggcccatcggccaaaaacaaacggagaggaatgaaggaaatgaaaaaaatgttcactgcggggattgtcggacttttgacgctttcactcggatcacctgtttttgcagctgagaaaaagcacgaagaaacaaacgtcgccgtgctgtttgacgcaagcgggagcatgatacaaaaaacagggggagagcgtaaaatagatgttgcgaaagagtctgtcacttcttttgcggaagttcttcctgaagacacgaatctgatgcttcgggtattcgggcataagggcaataataaaaactcaggcaaagccgtatcatgtaacgcgacagaaacgttatacggccttcagccgtacgccgtgactccatttgagcaatcactcagcaagattaaaccgaccggctggacaccgatagcgaaagcgctttctgatacacgtgaagaatttgagcgggccggcgctaaagggaaaaacgtcgtatatctgatcacagacggtgaagaaacatgcggcgggaatcctcaagccgaaattcaaaagctccgtaaagcgaatgtcaacacggtcgtcaatatcatcggcttcaacttcggcatgaaaggaagcgaaagccttgaaaaagcggcggaagcgggaggcggcacatacgtctcagctgacagcgcggacgagttcaaacaggcttgggaagacgccgcaaaggatttagcaaaagaataggttaaaaaaggacgcccgtgcggcgtctttttttgtttagaaaacggaaccgcgggaatgatacggataaaaggagatgaacgctgttgttaaaaggagcaggcattatattggtgctggcggcagtcgtttttgttctgatagggatttttctgaagcttgccgccttcatattcgtcagtatattggccattatcgccgcagttattttattcaccattctgagcagacatcatcgcaatgaaacatagagtccgaagagggctctttttttaaaccgcaaattcgacaaaatacagggattgtggaagaataaaagagaaggatactgcggaggggaaaacagtggatgaaaaaacaacagcggtaagagacatataccgctatgaaaaaggggtattaacaaagacggcagatcggatggtttcagagtatccgcttaccgtcatggtgaacgggcaggaatttgttacgctcgtctgcacgcctgaccatttagaggaactcgtcatcggatttctcgcatcagaaggcgtcattcgttttgaaaaagagatcaaaagctttactatagatgaaagtctcgggttcgcatatgttgaactgacgaatcccggagtgcttgagcaaaaagactatacgaagagggtcatcggttcatgctgcgggaaaggccgccatttttactttcagcaggatgtgaaaacggccaaaaccgccgtcagccggattaccataactcctgagacgtgccttcgcctgatgaaggagatgcaaagcggaagcggcaccttccgggaaacgggcggcgtccataatgcagcgctgtgcgatacggaaaagctgctcttgatgaggacggatatcgggcgccacaacgcgctggataagctgtacggctgctgtttgaaaaacggaatgcccgtccgtgacaagctgatcgtcttcagcggccggatttcctcagaggttttattaaaagccgcaaaaatcggcgtgtcgattgtcatttcaaaatcggcgccgacggagctcgcgctgcaaatggcggaagagctgaacatcaccgcgatcggttttgtcagaaacggatcatttaacgtatacacacatcctgaacgggttgaacaatagaaaggggtcttgggcttatgaatacagaaacgcgccgggtgacagacaaaaaggaaaggccgctcagggatcttcgtatctctgtaaccgaccgctgcaacttcagatgcacgtactgtatgccagccgaattattcggaccggattatccatttttacaaaagacggaattgctctccttcgaggagcttgagcggcttgcgaagctgtttgtcggccgcttcggcgttgaaaaaatcaggctgacgggcggagagccgctcatgagaaaagatatgcctgaattgatcaaaaaacttgcgcgcatcccaggacttaaagatatcgcgatgacgacaaacggctctctgcttcccgtgtatgcggaaaaactgaagcaggcggggctgcatcgagtgacagtcagcctcgattctttagaggatgagcggtttaaggccattaacggccgcggcgtttcggtgaacaaggtgcttgagggcattgaggcggcaaaagcggccggactcggtgtgaaaatcaatatggttgttcaaaagggcgtcaatgaaaaagatatcctgccgatggcccgctattttaaagaaaaaggtcatattctccggtttattgaatttatggatgtaggcaatacgaatcaatggaataaaaaagacgtgatcacgaaggccgaaattattgatctgatcaaccagcacatgccgacggagccgatagaagcgaattacaaaggagaggtcgcttccaggttccgctatcttgacggttccggcgaaatcggcgtgatttcctccgtctcggatgcattctgcgcctcctgcaacagagcgcgcctgtcggcgagaggcgagctgtttacgtgcctgtttgcgtcaagcggctatgatgttcggaaactcgtgcgcggcggtctgaccgatgatgaattgacggaatccatcgcttctgtctggagaaatcgcgcggatcagtattcaattgaccgcgcgctttctaaaacggatgggaaaaagaaagtggaaatgtcttatataggcggatgaagaaaagcttgcccggacaagggcaggcttttttattcacaatatgagagcggtctgttcaaaaaataccggtaacagccgaaatatatgataggaattttgatgcaggacaatcaagttatgcaattccaaagccatacaatatgttaaaatataaccaatagaaattagaaaaggttgtgaaaggggcatgaccgcatacgagattccgtcatctcaagttggagtcaagatcaacaaatggtacaagcacattttagcgtttcaagcggctgatgccataaagctgaaagaggaaattgatgaggatatacaacgtatggaggaagaccagctgctgctgttatattatcagctgatcagctaccgccatcatattatgcttgattacgtcaagccggaatgcaccgaacaatcacagattcagtacagcgagctgcaaaagacgatcgaaagcacggacagcatatcgggactgtctgagtattatttccatttgttcagagggatgtatgaattcgatcacaataactatgttgcggctatttctttttaccggaaagcggaaaaactcctttcatttgtcgaggatgatatagagagggcggaattccatttcaagatgtctgaagttttttacgtcatgaagcagactcatttttccatgaatcacgggattcaggcgctggatacgtatatgaaacacgatttttacagagtgcggagaattcaatgccatttcgtcatttcaggaaactacatcgactgcaaaaactacgacaaagcgcttgagcatttagacgaagccctccgcctttctttgcttgaaggacagccccgcctgatcgggtcttcgctttacaatctggggaattgttatgctgaaaagcgggatctggatgaagcggcccggtactttagaaaagcggttcccgtttttgaagagcatcagcttgaacagcttccgaaggcgctgttcagcttaacgcacacccttttcaggctgcatgatgaccaagcggcccttacctattatgaaagagggatcatgatcgcgaaagaacgcggcgaccgattcagtttagagaagtataagtttttacaagcgctttatttggagtcactcaatatggatttaatccatgaagtgtttgactatatgaatgaaaaatcgctgtatgtgtatattgaagatttcgccttggaggccgccgtttacacaagcgcacatgagcaatataaagaagcggcgtatttttatgaaaaagcgattcgcatgagagaaaaaattcaaaaagaacagtgtttatacgatatataatttttgttaaccatctgatcagcagatggttatttttttatgcacatcaggacgtttgatcatagaaaaaatcggaaaaatcgcaaaagagggaaaaaagtacgatgggaaggagggatttgttgttcggatttaatgatatgataaagtttttcgtttcatttctcatcattctcccgatggtgtctgtcatccatgtgtcgggacacagctttatggccatgctgttcggaggcaaggcgtcgttggatatcggaatggggaaacgtcttttaaaagtagggccgattcaggttcggcgtatctacttcatagattctttctgcaagttcggcgaattgcggatagataaccgtctgacgagcgcgctcgtctattccggaggctgtctgtttaatctcgcttctatctttttaataaatctgctgatcataaaagatttcctagagccaaacttatttttttaccaatttgtctatttttcaacttattatgttttctttgctcttctgcccgtgcaatacggggataataagctgtcagacggattggccgtttacaaagtgatccgctacggggaacgctgtgaaatcaataattgagagttgaaatgtttgctatcaggctgaaagggaagaaaacaagtacacaaaaacaaaaggagctgaagagatcatgagtgaagataacggtttaaaagacaaagtaaaaggcggcatgaacaaaataaaaggggaagcaaaggacaaagcaggcgacatggcaaacaagtccgacttaaaagcggaagggaaaaaagacaaagcgaaaggcagcctgcaaaagggtgtcggtaaaacgaaagataaactcagtgatgattaatttgatcgtgaaacacagcaaaagcccaaaatattttgggctttttgttatgagaaatgacaaaaattccagttcgtttggttaatattcactaaatttttaaatattctataaattccccggcgatttctttataatattcacaaagaatgtaacctttcttcacatttaattaaacgtttgttgaagaaaaaaatgagaaatcggtcatttctgcaaaaggaatcgggccgttcactgtcgaataacttttatcacttaacatttcatgaggtgaagggggtgacggccgcctgcatcgtttcggtatgaccatgcggattgtgtttgactatcactaagggggaatacagatgaaactgacaccggttgaacaagaaaaattgcttatttttacggcgggagagctcgctaagcagcggaaggcgcgcggcgttctgctgaattatcccgaagccgccgcatatttgacctgttatctgatggaaggcgcgagagacggaaaaagcgttgctgagctgatggaatccggccgcaatgtattgacggaaaaagacgttatggaaggcgttgcggaaatgctggacagcattcaggtggaagcgacgttcccggacggggttaagcttgtcaccgttcatcagccgatcaaagcggaggtgaagtcatgaagccgggagcgattcaagtcgcaaaggggaccatcaccattaacgaaggccggaagacgctggaggtgtcagtcaccaataacggaacacggtcagtgcaggtcggatcgcattttcattttgccgaagccaacggcgccctttccttcaatcgggacaaagccatcggcatgcgccttgatatcccgtcaggcacatctgtccgttttgaaccgggagaagagaaaaccgtcacgctcgtggaaatcggagggcgaaaaacggtcagaggcctcaacggcatggccgatacgtatatggatgagcggggaaaagagaagacgctgtcaaatcttaaaaaagccggatggatggaggaggcgatccgatgaaaatgtcacgtgagcaatacgcagaactgttcggaccgacaacgggagacaaagtcagactcggagatacggatttatggattgaagtcgaaaaagatttcacgaattacggggaagaaatgattttcggcggagggaaaacaatccgggacggcatggggcagaacgggcgtatcaccgggaaagacggagcgcttgatctggtcattacaaacgccgtcatcctggattataccggaatcgtcaaggcggatatcggggtgaaggacggccggattgtcggcgtcgggaaaagcggcaaccctgatatgatggatggggtggacccgcacatgattatcggtgccggaacagaagtcatttccggcgaagggaaaatcgtaacggccggcggggtggatacgcatatccactttatctgcccgcagcagatggaagtcgcgctttcttcaggcgtgactacgcttctcggcggcggaacaggtcctgcgacgggaagtaaagcgacgacttgtacatccggtgtatggtacatgtcgagaatgctggaagcggccgaggagtttccgatcaatgtcggtttcttaggaaaaggaaatgcatccgataaagcgccgctgatcgagcaggtggaagcaggcgcaatcggcctgaagctgcatgaagattggggatcaacgccaagcgccattaaagcttgcatggaagcagcggatgaggcggacattcaggtggcgatccacacagacacgataaatgaagcgggctttttagaaaatacgcttgatgcgatcggcgaccgggttatccatacatatcacatagagggagccggcggaggccatgcaccggatattatgaaactcgcatcttacgccaatatcctgccgtcctctacgacgccgacgattccatataccgtcaacacgatggacgagcatcttgatatgatgatggtctgccatcatttagattcaaaagtgcctgaagacgtggcgttcagtcattcacgcatcagagcggccaccattgcggcggaggatattctgcacgatatcggcgcgatcagcatgacgtcatctgactcgcaggcgatgggcagggtgggagaagtgattatccggacatggcaggtggccgataaaatgaaaaaacagcgcggcgctctatcgggagaaaacagcaatgacaatgtgcgcgccaaacgctatatcgccaaatacacgatcaacccggctgtcactcacggtctgagccatgaagtcggttccgttgaaaaaggaaagctcgccgacctcgtactatgggacccggttttcttcggcgtcaaacctgaacttgtgctcaaaggcggcatgattgcccgcgcccagatgggagatccgaatgcttccattccgacgcctgagcccgtgtttatgcggcagatgtacgcatcatacggtaaagcaaaccgcaatacctctattacatttatgtcccaggccggtatcgcaaacggtgtgccggaaaagctcggccttgaaaaaatgatttctcccgtacggaatatccgtaagctgagtaagctcgacatgaagctgaatgacgcgatgccgaatatacatgtcgatccgaaaacctatcaggtgttcgccgacggagaagagctggcatgccagcccgtcagctatgttccgctaggacagcgttatttcttattttaatccctctccggccggtttcccgccggcctgtttaccctctattgccaacttgatttcatcctgccgcccgttttagtgtatattagtagttgacaaacaaatgaaatgtaactattttggttacaatggtggtgaaaaacatgattaacagccgtcttgctgtggccattcacattttatcgctgatctcaacggatgaacgggcgtcatcggacatgattgcgggcagcgtaaacaccaatcccgtcgtagtgcggagaacgatcagccagctgaaaaaagcgggtattctgacatcccgggcgggtgttccgggagccagcctgaaaaaagatccgtcggagatcaccctcttagaggtttacagggcggtgcagaataaggaagagctttttgcggttcacgacaatccgaatcccgactgtccggtcggcaaaaatattcagcgcgcgctcgatgagacgttcggaagcgtacagcgggcaatggagaatgaacttgcgagcaagtccctttatgatgtaatgaatcatctcttttgttaaaaagagatgggttcatgccgctagacgtgtaacggaaatggttacaatgggtaatgaggaaatcacggttttggctccatattcagacaagcctggatgcgggattgcgatctgtttaatgaagaaaacctccgaaactaaaggaggtggtaaccgggatatttttattttgcttaaggcttatgtgaaggtgtctgttgtaagcgggttaccaaaaaaagacggaactcttattttaatacgcgctaaaaaaactgatggagaatatcctgcctccggtaatgccaaaaccgttcgcctcttcacaatcattataaaatttctcaaggaacgatcagcagcccgttagctgcccctcattagagatgagctgttaccacactgttacattagaacttccgctgcttttatatccttctgtcgctaagacttgataagcccaattactgcccagattcattccatggctcttccatgcgttaacatgattgctgaaagtgattgcagcgttgcttccggtcggtctcttcgactggcggacactccagtactgcgtaaaagtagtgttatcgccatcaatggaaggtgcgttataacgtgtcgttgtatatatgtcatatgtacctccatcactctttacggtacctttatacgttccggtaggtctgtaagtaccccatgaatccaccacataatattcgatgaggggcgatctcgtccagccatataaagtcaaatatccattgccgttcggcgcccaaacaccggcattatagtttattgttctaaatggcgagcctgtagtccagcctttaccaacaacgaaattcccggtattagaccaattaacactgtaatttccgccagagccattgactgcgtttactgttccgcccccgtcagtccaattttgccagtaatctgtgccagctgcagaggcggttgccgaaaacatgctgatactcatgaaagctgccgttaatcccactaagaatttctttttaaacttaaacatatgttacctcctatactattttttctgactttgacatgaggcagcactcgtaaatatttaacgaacgccaacgcttttgatcgttcctttcaatataatagcatgaatacatgggtgaatattaagaacaattgtaatttaattacaaagacccaaaaaattgtatgatgagtggtcttgtaccgccatagccttatttcgcagaactcagtgatttcagttaaaactctgaggaaacgttttatttgaaaaaacttttttgccgaaagaatatctgcatacagcgtcaatgctgttcgccgtattggcaaatccgaagcagaaaaactttaccgttgtcggagaagcggaataagaaaaaatcccgggcggatgcgccgggattttcctttttaatatgtattggcatcaatattattaaacgcgtcgtccacgatgccgagcgtcatgaggacaatgaaaagaacgataccgagaacggacaagccgaccgtcacgatcagatagatcccctgcattttcacgaactttgcataattctccagcatatgttcctctgtcagttcattgaactgcgccgccatctgtcccgcttcatttgccgagcgcatcagaaaaatgccggcaatgatctgcagaacgccgggaatggctccgattaaaaagaaaaacgcgcccgaaagcgccgcaaacgcgcctataataataaacaaaatacctgtcgcttttccccatttcgaaatagaaataagcgaacgattcactgattcaggtttcaaaccatggcactcctttacaaaaaaatactcacttttcatttatacactattcggtcattcttttgaatataaaatgtgttttttcaagctgtgtccgtttttatatcagaaaattcccgagaaacatcccgggaattacaaaatcggcgacagaagccttgaaatcgattctttaatgcggatccgcagcgaacgctcctgatattcttcatacgtatattttctggagacgagcagatcttctttaaatgaggaaatgagttttttcgcgatggtgacgtcataaataaaggcgttgacttcaaaattaagtctgaagcttctgacgtcgatattcgccgtaccgactgaagccgtctcatcatcgacgacaatcgtttttgcatgaataaagccgttatcgtaaatgtagactgaggctccggctttcaaaagatcgccgatgtaagataaagtcgcccagtaaacgaaagcgtgatccggcttgttcggaatcatgattttgacgtcaatgcctgacagacaggcgatcctgagggcatccaaaagacttgagtcaggaataaagtaaggcgtctgaatcaggatcgaccgtttggccgttgagatcatcttgatatagccgtttttaatttgttcccattctgaatccggtccgctcgtgacaatctgcatcccgacattgcccttcggctcgcattccggaaaatgattcggaacgtaagtgagcgtatggtgatgggaagcttggttccaatcgagaataaaccgtgtctgaatggcgtgtaccgccgtgccttgaagtctgaggtgcgtatcgcgccagtagccgaatttcggattcaggccgagatattcatctccgacgttaaagccgccgacatagccggtttcgccgtcaatgatgacgagcttgcggtgattccgataattgagccgcaaattaatcggacgaagcctggaaggaaaaaagacttccacatggccgccggcgtcccgcagcggtttgaagaatttttttctgagtgatcttgaaccgagttcatcatataacactctgacctttacgccttcccgtgcttttttcactaaggcatcgcgcaatttttttcccagttcatcacctttataaatatagtattgaaggtgaatgtgatcttttgcgttggaaatgtccttcattaagcgtttgaacttatcgcgcccgtccgttaaaatctccaccgaattatcctctgtaaagactgcgtggttgttcatgacaagcatatagatgaggtctttattatccacagtcgccctgttgttaaattggaattgcctcgacttcagatctttcagctgaaacttcagcagcttttctattccgatttttttacggtcttcccattgaaacaggtgcttgcgtctcaggttatggccgaataacaggtataaaataaaccctaaaatgggaataaaaaaaagaaccaagagccaagcccatgaagcgctggcatcgcgtctttctttgaaaatcatgatgacggccaaaagtatatttaaaacgaaaaaaaatccgaataaaataaatgaaatgctcactttgcaaccccgctatatcatatttatcaagactgtgcccattagtattccgacaagtgcagcaatctgattcccatttcaaattataacattgacattttgaaagaataaagagccggaatcaaagatgaatgcagttttctttcaaagaaagttccgggtgcggtaaaatatgcatatatgaaaaagaagacaaaaatgacagcaaaggggagagggcatgaagctggagcatgcggaacaattgccgggattcataaaaaaagaaattcagaaaatacaaatcgccatcgcgccgctgatgaaaaaaagcatcatttaccgttttcttgctttcccgctcgccgcttttagtctgtttcatctggcatcgcttttgattcaggccccttccgggagaggagctctcgtatcggccggcatttttgccctccttgcggctctgggtcttgcgttttttaaggaagccggctatcagcggaaacaggtgcaaaaaacgatccggctttatatgctgaacagaatcagaaaaagcgatattctgtccgaggaacggaaaagcgcctacacccggctgattgccgaggagccgtctgcgatgaagagctttattgaatttttaacggaagaagaccggaaaaaagaaatgctgtattaaaaaagagctgacgcgcgatcagctctttttgtcattcaaacacaggatcgttctcatagtaatatgaatcaggcgtgtcatacgtatcagtgctgtaataagccataattccgatgacagcgaagatgacgactaaaataaaagcgagaatgcccagtaccacactggatgccgcgtaaaaaaactgcattttgataaatgacgcataatgtgcaagcatattttcttccgcgttttcttctagcccttcctgaagggcggcagccgcttttgccgagcgcatcagcatgacgccggaaatgatgagcagaacacccggaatggctccgagcagcgtcacaatggctgacagagcggaaagagaacctgtgatgatcagaaacacggcggtgatctttccccatttggcgatgtcggcaagggaacgggcttttttattgagcggctggttttcgtctttgtctttatcgatggtgatcatgacagttctctccctaaaatgttcaagtcatatcgttttccgtccatttcggcgatacccgggaatacgccccattcggtaaaaccgaatttttcaaacagcttaatgctcggcacattatgtccgaagataaaagccatcaggctgcggatgccgattgccggagcgagtgccagggcttctttcagcagaaagcttcctgctcctttgccgcggcaatcctgatgcagatagatgctgatctccgccgttttgtcataggccggacggccgtaaaacgtttcaaagctgatccaggccgccactttgccggtttcatcttccgcgaccatcagcgggcgccggtccgtgtgccgcaaaaaccaatccatctggtctgcgggcgtcacttcttccgtatcagccgttaccattcgtgaggcaatcgtcgagttgtatatggccaccaccgcatctaaatcctccaatacggctttgcgcagggttaaattcatattccgggatctcccttcacatttcattacataattaagtgcaatctgcacatactacttctaaaaaagttttttatggatgtgtatatattttcagaaaagtgttcagaatgttgctgaggtgatgaacaaatgagagaggaagaaaagaaaacttctcaagtcaaaaaacttcagcggttttttcgcaaacgctggatattccctgcaatctacttagtcagtgcggccgtcattttaacagctgtcctttggtatcaatccgtttcgaatgatgtgaaggacaatctgacgaacaacggcggaaactccgcgtatgacagcggcaaagacgatgccgtcgaagtaggcaagtcaatggaaaacgtcgcaatgccggctgctcattctgaaaatgtttctgttgtgaaaaagttttacgaatctgatgccgcaaaaaaagagaaagaagcagcacttgttaactataataacacgtacagcctcagtaaaggaattgacttagctgagaaagacggaaaatcatttgatgtttctgcttctctgagcggtacggttgttaaagctgctaaagacccggtactggggtatgtggttgaaattgaacactcagacggcctgtctactgtctatcagtctttatctgaagtcagcgtggaccagggcgacaaagtaaagcagaaccaggtcatcggtaaatccggaaaaaatctttacagtgaagaaagcggaaatcacgtgcactttgaaatccgcaaggacggcgtagcgatgaacccgctcaattttatggacaagccggtaacatctattgaaaaagcggcggctgaagagaaaaacgctgtgacagaagaaacggaagggtcaattcagcagtcttccgagaaaaaagatgtgacgcctaaaaaagaaaccgaagaaaaaccaggtgacaaagaagacggcacaaaagacaagacagatggtaaagatgacggctcaatgaaagattcgggcaagtaatcttgatcccaaagcgtctatcagctctgataggcgcttttcatattgctgcatgtgcctttatactaatagaaaacgaaggagatgctgaatgaataaatgtctggcggccgggtggctcgtctttgttttcgtttctgctttgactgaaagctttcacgatatgattgtgtcgcagacggtgtccttccgtttcacgtcccatccggatgtgtccggtttctttgtgttcgatatggcggagctcgccataccggaagcggcgattcaaaagctcgggcacgcgttttcattttttgtgctcgcctatttgtttttcagggagcgcaggcgcatgaagagggcggtgctgtatgcattggccgccgctttcctgacagaaatcgtccagctctttttcggcagaaacggatgcctccgcgatgtgctgattgacagtctcggcattgccgcattctgggctttacaaaggaaaaagcatacagccaaacatacaaaaaccggcagtctgtgacagacgccggctttttttatatattatggtttgtcgatttgcttttatgaacgatactttcatagattcgcacgatcagatcgacaatcggacgaagcacatttgaaaatctgaacagcaggaatccgacaatgagggaaacgataatgcttccgagcacatcgatcggataatgatggccgacccaaattcttgagaagccggtcaaaaggccgaaaatcacaagcggccagccgagttttttgttgcggaacagaatcgcaattgaaatcgccaaagcgcctgtcgtatggtcactcgggaatgaagcatccgcggcatgagggatcagcgtatgaaccgtatgctcgacaaaggggcgcggctcgacatagactttcgtgatgaggtagttgatgataagcgccgcaacacccgtgaagcccgcgtacagggcgttttgtctgccttttgtgcttccgaacagccacatggcaagcaggaaaagggcgtaggcgtaaatggcgtattccgttataaaaaccatgatagagtcgagaatggcactatggtgcgacaaaccattgatcgctttaaatagttcgtaattcacaaatatcaccttttatctttattttatatgaacagtgtaatgcttttttctatgagacacaattggtattaaaaataatcataaaaaagtaaacagaatgaaacgtgactgtattactgtgcgtcaagtatgcgggaaaagaatagccgaaggagttttgtccgttgctgaaacgtttgaaaaacgccgatctgccgcttgtgtttgtcattatgctgctttgcggattcggcttgttaatggtgtacagcgccagtgatgtgatggggtctcagcggtacggagatccatcctatttcttccataaacaaagtgcctctttactgatcggattatgcttatttctatttgccgcctgtctgccgtataagcggtatgcgcggcttgtaccgctgtttgtggtcggttcgctggtattgctgctgctcgtattgataccgggaatcgggctggagcggaatttttcccgcaggtggctgggagcgggcccgcttgtcgtacagccgtctgaattggcgaagatcgccatgattttgtatttcgcttcggtttatacgaaaaagcagccgtacattcatcaatttgtgaaaggggttctgccgcctttagtaattttggggaccgcttttctgctcactttggcggagcctgatttagggacggcttccttaatcctggcggcgtgcgggtcgattttattatgtgccggcttgaaaaagcgccatcttttcgtgctcggcgcgacggcggtgtcgggggttgtttatctcgcattttctgcatcctatcgtgtgaagcgcctcgtttcctttaccaatccgtttggtgacgcgaacggggacggctatcagctgattcaatcctattttgctatttccggaggcgggtttttcggaagagggcttggaaacagtgttgaaaaaatgaactatctgcctgaggcgcataccgatttcattatggccgtgatcagtgaagagctggggatattcggtgttctgatcgttttgggattatattttgcgttaatgcttctcggcgtaaaaacggccgtgcgggctgatgacccgttcgggaagcttcttgccatcggaattacgtttcaattaatgtttcaggttgtcttgaatttgggagcgatgagcggactcctcccggttacgggtgtgccgcttccgtttatcagctatggcggttcttcattgattatgacgctgtttttgtgcggcatactggtcaatatcagtacatatgcgaaaaaacaaaccgtacggcataagcgtcctgccccgcatgaaaaaaaggcttcttctttttaatgaagcccgaaaaaaacgcccgggacatgctgtctccgggcgttctgtctgtttataaagctcctggtccttcttctccggtgcggatattaatcgtgtttccgatttcatagacgaatattttgccgtcgccgggctctcccgttttcagcacttttttcgccgtttccaccacttgatcaacggggaccttgctgacaacgatttccactttcagccgttcatatacattgctttcaattttgactccgcggtacagttcggtgtgagctttttgaaggccgcagccgtgtacgttggagaaggtcagcgatgtgactccgattttaccgagttcctgtttcaatgtttcaaacttagccggacgcgtaacgatttctaccttgaacatttgaccgctcatctaagccactcctcactttataagtcctgatatgctttttccccgtgcatcgttaaatcaagcccaagtgactcttcttcttcgctggcgcggaggggaatgaacagacctacaattttaatgataacgaaagtgacaataaatacaaatacataggttgccgcaatggccgcaatctgcttccagagcagtcccggatcgccgtaaaacagtccgtttgccccgccgtcattgacggaagtggtggcgaataaaccggtcgcgatgccgccccatgtcccgccgattccatgcaggccgaaagcgtcaagcgcatcatcgtatccgaaagtctttttgagccaatacacgccccagaagcagacaagcccgccgatgaaaccgattacgatggaagagaacggcgtaacgaacccggcagccggcgtaatggcgacaagcccggcaatagcgcctgatacagcacccagcatggtcggttttttgttcagcatccattcgattaaaatccagccgataattccggccgcagccgcggtgtttgtgttaatgagggcaaacatcgcgatactgtcaagcgtgagggcgctgccgacattgaagccgaaccatccgaaccaaatgagcgccccgcccaagaacgtgtaaattaagttgtgaggcgaagccgccgtgccgtccttgcgtttcccgagcacaatcgccagcacgagcccggcgaccccggaagaaatgtggacgacgtttccgcctgcgaagtcaagagcgcccatttggccgatccagccgccgccccatacccagtgcgcaacgggcgtatatacgagggaagcccacaaaaaggaaaatacaagaaaagcactgaatctcatgcgttcagcaaatgctccggaaataatggccgtcgtcagtacggcaaacgtcatttggaacatcatgaataatgaatgcgggatcgtatcactataacttccgggttcaaagccgacccccttcagtccggcccattcaatcccgccaagccatgtattcccgggggcaaaagcaagtgaatatccgtacaaaacccaaacgacggatacgatggcgagggaagaaaaactgtgcatcgccgtgctgagcacgtttttgctttttaccattccgccgtaaaacaaagccagcccgggggtcatcagccacacgagtaaagcgcaaaagaacataaatactgtatcgcccatctgcatgttgtattcctccgtctcattcaaaatgtaatcgtgattaattcattattatagagaaaaaagaacgataaaacattttcgtgtaaggttatctgacatgtttttttgcgttcataatgtcgctttttcaaaggggtgtcatgcgactttatatccataaaaagagcgctggagcatggcggaagaaatcctgtccgggaaagagtaaaataaacggggtgagaaacactaactgcatcaggaggaattattatgacaacatcattgaatctgcaatttgaaaaaacggctttggtccttattgatttacaaaaaggcattgtgccgatggataaaagcggtaccgttgtgccgaacgcgaaaaaattaattgatgtgttccgggaaaaaggcggatttatcagctttgtgaacgtagattttcatgacggagcggatgcgctgaagccgctgacggatgaagaggcggcgggccattcggctccgccggcggattgggctgaatttgtgcctgaaatcggagtgaaagaaaacgattatacggtaacaaaacggcagtggggcgcgtttttcggcacggacctggaccttcagctcagaagacggggaatcgacacgattgtgttatgcgggattgcgacaaacatcggtgtggaaagcacggcgcgggaagcttttcagctcgggtatcagcaagttttcgtaactgacgcgatggcgacattcagcgatgaacagcacgaagcgacactcaaatttatcttcccgaaaatcggcagaagccggacgacggaagaatttatcgcacagacaaaatgacaatctccaaaaaaagccgcgtcctgttcttgacggccgtggcttcggggacgatgctgaacccattgaactcgtcgatgatttctcttgcgcttcacagtattcagcatgaatttcacctgtcgtttacaacggtgtcctggctgatatcgtccttttatcttgccagcgcggtggcgcagcctgttaccgggaagctcggtgatatgctcggcaggaagaagctgtttttgatcgggcttctgcttgttgccgtctcggcggtcggcgcgccgtttgcgccgacttttatgacattgctgatcatgcggctttttcaatcgatcggaagcagcgcgatatatccgtccggcgtcggattgatccgttcaaatatacaggagaagcaggcttcggcgctggccgtcctgtcaatctttgcatcagccatgacggcgctcggtccgactctcggcggttttctgatcgtttggggagggtggccggcgatctttttcgtcaatctgccgtttatcatcctcagtttttttctcggaatgtatatgtttccgaaagatgaaaaacgcgagatcggcggcttgaaaggcgtgctccgccagcttgatacaatcgggatactcctgtttgccggagcgattatccttctcctgtcgtttttattgtccttcagtacgaagcctcactatacagaaggcgtattcgggcttttatttgtcgggctgtttatctggcgtgagctgaaaacagagaagccgtttattgatgtcaggctgtttaaaacgcatcggaaactatcgtcggtgtatattcaatttattttgctgaatatattcttttactgcatctttttcgggcttccgagctattttcaggatgaaatgcatttgtccgttcagacaagcggattgattatgctgtttatgtcgggcatgagtattctggtgtcgcctttgaccggaaaatggatagataagaaagggcttcttcagccgattgttgccggaacctgcctgaccgcgatcggagcggtgctgttaacgtttttcttccttcaggcgcccatgataggaaaagggctgatcctgtccgtgctgggtgtcggctacggtttcggaaatgtcacgtttcaggcggccatgctgaaaacgagccccgccgacatggtcggaacaacgtccggcctgtttcagacctgcaggtatctcggttcgattttgtcttctgtcattttgggcattcttttcggaaaagaaattaccgccggccattttcatatgctcggcacgattcttatcgttgtcggcgccgtaagccttttgatggcgttccggttttcggttctcctcaaaaaagcctcttaacaggcgcaaaaaaaagagacgggctctccccgtctctttttttgtgtaatgtgctcaaaaatcaaaacgattattgtcgacagcgaccaatgttatttgcggaattttcagttatattttttcacatgtgatgtaaggaaaacgtacatgcaggagggagaaaatgacaaaaataacgagtgatcggctaagcaacaaagatttactgcctttagaagacggcgaacggacatggaaggcggtgaattttgcatccatctggatgggttgtattcataatatcccgacctacgcgactgtgggcgggctcattgcgatcggcctttctccgtggcaggtgctcgccattatcgtgacggcgtcactgattttgttcgccgctttggccttgaacggccatgccggaacgaaatacggcctgccttttccggtcattatcagggcttcttacggaatatacggagctaacattccggcgcttctcagggcatttacagccatcatgtggctcggaattcaaacatttgccgggagcactgccttacacattctgcttttgaacatatggccgggctgggggagtctcggcggagattggaatatattcgggcttcatctgccgggctttctgtcgttcattttcttttggggcattcatctgcttgtgctgcggcacggcatggaatcgatcaaaaaatttgaagtgtgggcgggcccgcttgtttatctcgtcttcggcggcatggtctggtgggcgatagatattgccggcgggctcggtccgatttactcacagccgggaaagttccatacattttctgaaacgttttggccgtttgccgccggagtgacgggcattatcggaatatgggcgacgctgattctgaatatccctgacttcacccggttcgccgcgtcgcaaaaagaacagattcgcggccagttttacgggctgccgggaacgtttgcgctgtttgcgtttgcaagcatcacggtgacatccggatcacaggtagcattcggagaaccgatctgggatgtggtggagattttggcccggtttgataatcctttcgttatcgctctttcggtcatcacactttgcatcgccgccgtctcggttaacgtggcggcaaacatcgtgtcaccggcctatgacttggcgaatgtcctgccgaagtatattacattcagaaggggagggtatttgaccgccgttttggctctgttcacaataccgtggaagctgatggagagcgccacgaatgtatatgcgtttctcggactcatcggcgggatgctcggaccggtggccggggtgatgatggctgattattttatcatcagaaaaaggcagctctcagttgaagacctttattcagaaaccggacagtacacttattacaaaggctataattaccgggcctttgccgcgacgtttctcggcgcgtttatttctttaatcgggatgtacgtcccggcgttcgccggcatctatgatatctcctggtttgcgggtgtcattttgtcatgtctcggttatacggcgcttatgtacattcatcctccttatgcaaaagcggagggacgaatcgtgcgggaaagagcggccgaataaaaaaagccgggggctgcccccggctttttgtcatatcagtctgcgattgaaacgtttccgtccgcttcaagcggcgttctttttttctggctccagccatacaggagcaaagcaatcaggacgaacagccccgctgccagataaatcgaatggaatccggccgaagcgacgaagaggccgaatacatatgacccgccggcaatcccgctgtcaaagaaagtgaagaaggtcgccgtcgcaaagcctgaacggtgtccgggcgaattctgaatcgccagcgtctgcatacacggtacgatagagccgtatccgagaccgattacggcaccggacaagagaagcatgagggcgctgtttgtcatcgccagcatgcaaagccccgcggagaacacgataatcgacggatagatgacgattcccggccccactctgtcaaacagctttcctgtgaaaggacgggcggccatcatcgtcacggcgaaacagacgaagaaatagccgctgacatccaacaggtggatcgtctttgcataaacggataaatatgaagtcacacttgaataacagaaagaaatggacaacccgacaatcgcgattttaagcgcgcctttttcaaacatgtcggagaaagaaaaacggaacacagtcgttccgctgttgttttgatccggcacacgaatcataaaagcaatcagcaagcctaaagaaacaaatacagcaaaaagcgtaaagaacaccgggaacgatatgactttcacaaggctcagtccgagaaacggaccgatcgccatggcaaggttcatagacatcgcaaaataaccgagcccctcgccgcgccgcttggcgggaataaggtcagcggcaattgcgcctgtgaccgtcgttaaaatgctgaaccagatgccttggaaaaaacgcagtccgagcagcagatagaaattgtgtatcggcaaatacagataagaagacagggcgaacagcgccagagatacaatcgtcattcttttcttaccgaaccgttcaataatcgcccctgaaaaaggacgggtgataatagcagataacaggaacaggctgatcaaaagccctccttgcgattcactgccgccaagctcctgaatcatatagataggcagcacggccaaaaatgtataaaagaacacaaagacaaataaatttacgagtacgaccataataaaatctttggtccagatcgagtcagatttactcaaaagtacagcacttccctttctttattatttcgttaaaaacacattcagaaactcagaaaaagcttccttatctccatcttggaaatccgcaagcatgtcttcctcgaacttcagcatctcttgattgatgctgttgtatttcaattcagcttccttcgtcaggacgacgagcttttcccgcttgtcttctccctgttcccgctgaatccagccgttttcttcaaggcgtttgatcgttctggtaacggtcggcgcctctacgttcagataagaccagatttctttttgggtcatcggtccgatcgtttttaagcaatataggattgaccattgagaggagtacaggccgaatggttccagccgttcattggctttcttcgtaatcaggcgggcgcattgattgatttgatgaatgaggcgtctgttgacgtggatcatttccgttctccttttcaaaaaacttacctaagtaactaattgtgctgtttcattctacagcaggatcgcgcggatgtaaaccccccgttcaaaaagcagaaaattatgacccgccccttgtccttattgagtttttagcatattcccaattcattgctaatacactgttacaaacctatcaaagagagtgtttgaggtgagggatcgtgggcatatttctaaaaccttcttatataatcggacaacgaagaagctgcatcatcagtgaatctgttacagaatacggatctcatttcacacttctcacatccaactggggaggtcgagtggtgtgcacgattacatcaaagagcgaacaatcaagattggtaagtatatcgtggagacgaaaaaaaccgttcgtgtcattgcgaaagagtttggtgtttccaaaagtaccgtacacaaagatctgacagaacgcctgcctgaaatcaatcctgacttggcgaatgaagtaaaagaaatactcgattatcataaatccatcagacatttaagggggggcgaggcgacgaaattaaagtacaagaaggatgaaattcttgaaggggagcccgttcagcagccgtagcgcctgacgtctgccgggcccttttttctcctccgggcggtttcgcgaatatccgcaaaattttgtcaagaacttatatcgatcagcagcttttttttgataaattatgataatatatataattagggcacaatgtggatattttactgtgaaacagatatcaaggaggatataaatagatgtttgcaagggatattggaattgacctcggtactgcaaatgtactgatccatgtaaaaggaaaaggaattgttctgaatgagccttccgttgtggcacttgataaaaacagcggcaaagtgctggctgtcggtgaagaagccagacgaatggttggacgtacacctgggaatattgttgcgatccgtccgctgaaagacggcgtaatcgcagacttcgaagtaactgaagctatgctgaaacatttcattaataagctgaatgtaaaaggacttttctcaaaaccgcgtatgctgatctgctgcccgacgaatattacatccgttgagcagaaagcgattaaagaagcagctgaaaaaagcggcggaaagcatgtgtaccttgaagaagaaccgaaagttgccgctatcggcgcgggtatggaaatcttccagccgagcggtaacatggttgttgacatcggaggcggtacgacagatatcgcagttatttctatgggcgatattgtcacctcctcttctattaagatggctggggacaagtttgacatggaaatcttaaattatatcaaacgcgagtataagctgctgatcggtgaacgtaccgctgaagatattaaggtgaaggtcgcaacggttttcccagacgcacgtcatgaagaaatcaccatccgcggccgtgacatggtttccggcctgccgagaacgattacagtaaacagcaaagaagtggaagaagcccttcgtgaatcagttgccgtcattgtgcaggccgccaagcaggttcttgaaagaacaccgcctgaattgtccgctgacatcatcgaccgcggcgttatcattaccggcgggggagcgctgttaaacgggcttgaccagcttcttgccgaagagctgagggtgcctgttcttgtcgctgagaacccgatggattgtgttgcggtcggaaccggcgtcatgctggataacatggacaagcttccgaaacgcaaactgagctgatgataaaacctcattctgaaaaagaatggggtttttttctgtcaaacccttcacgaacgggaatgtaaatccgataataagaaaaaatgctgattttcattatagaacaaatgttccggtgaggcaactggaaataatgctatttcagaggtggaagacttgttaaaaggattatataccgcaacgtccgcaatgattacacagcagagaagaacggaaatgctgtcaaataacatcgcaaacgcgaatacgtcaggatacaaagaggatcaaggttcaatccgcgcctttcccgagatgcttctgagccgaatagaaggcgataaaaaaacgaaaatcggttccgtcaacacaggcgtatacatgcaggagctgaaaccgttgtttacgcagggaagcctgaaaacgaccgatcagccgacggatatcgcgcttatggagaatcaggttcccaagaatgccgaaacgaatgaaaacgccgagctgttttatcccgtgcagactgcgggcggcgtccgctattcaaaaagcagcactttctcattaaatgaaaacaatcagcttaccataaacggaaaccttgttttatcaacaaacggacagccgattacagtcgacaatgaaaaattcaccgtatcagaaaacggaacggtcacgacaaacggccggccggcggggcagattgacatcaggatggaagaagacgtgcgcaatctgaaacgggacggcaatgacctatacagcacggccgacggcactgaactgccgagcgcggcggcgaatccccaggtctcgtattcattaaagcaaggcgtctcggagctttcgaatgtggacgtgacgagcacgtatacagaaatgacggaagcatacagatcatttgaagccaatcagaaagtcattcaggcttacgataaaagcatggataaagccgcaaatgaaatcggcaaagtgtaacaaaatgggggacgttcaattatgatgctcagatcaatgctgacggcttcaacagccttaaatcagcttcagcagcagatggatacagtcagcagcaacctttcaaacagtgatacgacaggctataaagcgagggactcccgcttttccgagctgatcagacagcagtatgaccatatagatgacaaaaaggaaaattcgccgaacatgcggaaaacgccgcccggcctgcgtctcggcgccggaacggtcatgactccgcagctggactcagggcagggaggcatcaaaaaaaccgaccgtgaccttgatatcgcgttcacctcaccttatcaatatcttcaggcagaagcggacggacggcgggtgtatacaagggacggctcactttccctcaagccggccggcggaaatgaccgggtgcttcagctgttgacagcgggaggcaatcccattctcgatgagaacggccagcccatacaaattgacagttcgctgaatcagctgaaaatcagcaaaaccggaacgctgactgcttcagacccggcaggaacccgttcgcagacgtttaatctcggcatcgtcaatgtcaataatcctcaggcccttcatgcggaaggggataatctgttttccgtaaacggagcgggggcatcagcgattgaagagcttaccggcgcaaaccggcaggcaatcggcatggagcagggcgcgcttgaaagttcaaatgtcgatatgtcaaaagaaatgaccgacctaatcgtgtctcagcgttcctatcagctgaacagccgcacgattacattgggagaccaaatgctgggcttaatcaactcagtcagataaaagaaggggcgttttgatcagccgcgcatgataaaaaatgcggctttctcaaaatcgcccttttttttgtagtaatcagtaatatcctgaagcagcacttccaaatccacccacgcttcaattttctgcagctccagcacgagtttctgcaatcggtcgtacgggtcctcctgagcggtgtacagtatgttgagcgcggtcagcttcaatttcattatcttgttctgcactttttcagatatgtataaacctttctgcagcacggtttgtccttcggcggcatatccggttttaaaaagtgctctgaccgcttcgtatacacaatgcaggtaggaaacgggagactctttctcgaaacgctgattgcccaatacctttttgtaaaaagggagggcctctttatcttttttctgggcggtctttaaaaaaccaaaattataataggcgtggcacagcaggttattgtcattgatccggtccgttatctttatggattcattaaagagctgttctgcgtcttcatagcgtgcctcgtctatgtaattcacggcgagaagcagacggcagctgagcgtttttttgatgtaaccgaattcaccttgatagatttccagcgctttattgacatattgaatggagagcgcaggcgacttcatcatgtaatatgcacccgctgttttataataaaattcagcggcttcgaaacggtcctgaatggccggcaggtactgttcagcttctttaaagcggcagacagcacggttcggagcgccattcaccatatggaataaccctttgaaaaaatagaaataataagttaattcatggtccatctcatctttgcgccgcttcagctcgcagaacaatttagtcagaccgtcttttttctcaaacagcagctgaaaccgtgcgaaaaacagctgatatctgagtttgagctttgcattcttttgtaatttggggagatgctgattgatttgttcgtgaagggaacgggctagatcgaattggcgttttcccatggcgtcataccactcattcagcatcaccagcgtacgtttttcagtaaacttagcaatcatcttccaacctctttgcatagggtaaaaatctttatttatcataacacattaatggacgaggctcattgccagctggttacagtttacagcgcggttgaaaaagaaattgattcataatatacttccaaatgtacagattggttagcgcatataccttctatacatactattgtcgatgaaggagatgtcaagaaaatgcttgatactcagcaaattaaagaaattattccccatcgctatccgtttcttctggtagacagaattacggaagtcgaagaaggaaaacgggcggcgggatataaaaatgtgacggcgaatgaagattttttcaacggccattttcctgaataccctgttatgccgggcgtcttaatcgtagaggctttggcgcaggtcggagcggttgcgatgctgattaaagaagaaaaccggggcagactcgcattttttgcggggattgataactgccgtttcaaaaagcaggtaaaaccgggtgacaagctggagcttgaggttgatattacccgcgcgcgcggtacgatcggacgcggcaaaggcgttgccaaagttgacggcgagctcgtgtgtgaagctgaattaacatttgcgctcggagaataaaaacaaacgaatgggcttataaaaaagcccattttgtatagaaaggggtgaatgtaatgtggtcagaatttaaaagctttgcgatgcggggcaatatcatggatctggcaatcggtgtcgtcatcggcggcgctttcggcaaaattgtgacgtcgctcgttgaagacatcatcatgccgcttgtcggcctgcttcttggcggtcttgacttttcagggctggccgtgacattcggcgatgctcatatcaagtacggaagcttcattcaaacgattgtgaacttcttcattatttcattttctatctttatcgtgatccgtacaataggcaagctgagacgtaaaaaagaagcagaagaagaggctgaagaagcagaagaaacagatcagcagacagaactgctgactgaaatcagagatctgctgaaacagcgggctcctcacaatgactaaggcacaaaaaaaggctggatgattaacgtccggccttttttatgattataatttttgtttaaacgcttcaatcagccggctgcccgagtagccttctttcacgagcgactccagaatgctttctgatccggggtggtttcttgacaccatttgaccgtaaattaaaacttgtatactcttttccagctccacaatatttttgatgcttcccgtcagctgggcggggcggttgctttttttcgtaatcgttacaaacaccttcgcttctttctggcttttcatcagcatgtcaaaaaaagaaaagtgttcggccgggaccagtgcttcaattaaccagtggttttctccgtcctctttgttgataatcaatccgtctaaaaggggaaactgttcaatcggctgatcgtctttatctaaacgttccacattcagatcaaccagtttaaaggttttcatctcttattttcacccctgttgtccatgtttttcgttcatttattataacacatatcatttttcccgggaaaatgctgtaagacatgcttcatcatttttgtaggcggtcaacatttaatcatttctattttttcattataatgtaaaagaatatggtcatggagagatgcttatgaatcaattgcgcctgaaggaaatctatatagaagacggttcaaggcgaaaagacgatcattcctacttggtatgcaaaaaggaagattgtgaggtgcatcttaacagaaggggaaatgtcgtctttttatatgaaacaaaagaccgcatggaacagtataaaattcagctttcattgactgataaaaagctgagtttttactggttcgcatgggacggcggaaagtttgtccgcatgtttgagaaagactggctcaaaacgaaacttttctcgcggctgctcaaaaatacatattacataagcggtcaaaaacaaaagttttttttatcagaaagaaaaacaaaaacataaaagcagcccaaacggataaaggctttttccgctttttgctttcataagcctttatactacaatgaagccagcctcgaaaaagagaggaggagacggcttgtttaaccacgttatgcttgtcggccggctgacgaaagacccggagctccgttttacatcagcgggcattcccgtcgctcatattacgttggcggtaaaccgcaattttaaaagcgcgtcgggtgaaaccggaaccgactttgtcaactgcaccatctggaggaaaaacgctgaaaacacggcattgtactgccaaaaagggtcaatggtcggtgtaagcggcagaatccagacgagaagctatgaaaagacagacggcgtaaaagtttatgtgaccgaggtcatggctgataccgttcggtttatggatcaaaaacggaaagagccgctggctgaatagcatgcttttttcctcgatttcccgcctttcagcgggccccgcaatacctccttcccattcgccagtcgaaagactggtttttttgtgcgggagctgaaaaatggttaaaaagaagtgatttcgcttataaatacttaaaaacattgaatatattgggataaaaacttataattacttacagataagtgacgaaaaaaagggaatgaggacgtgtatcaagaagaaagactgattgcgataatggaatatttgaaacagcaccggcggatcaccgctgaacagatatgttcgctgcttcatatttcaagagataccgcaagaagggaccttgtaaagctgaaagagcgaggggccattatcagaacacggggcggcgcgattctgccgtcagtgaatcaggaagttccgggctattcgggccggctgaaaaccgtttctgaagagaaaaacaaaatcggcaagctggccgcatccctgattcataaaggagaccggatcatcctggacacatcgacaaccgttcaggcctgcgcggagcatttaaatgtcaccggctgcactgttattacaaattcgatcaatcaggccgatatcctttccgcaaaagagggaattgatattcacctgctcggcggaaagctccagaaggaacaccggtttttatacggggcttccgttgtagaaaaactgggggattatcacgctgataaggtgctgatcggcgttgtcggcatctcggaaaacggcctgacgattccgcatgaagaagacggcatggtaaagcgtaaaatgatccgtcaggctgaacaggtgattgcgctgagcgatcactcgaagcttggccgtacgagtttttatcagtatgcagacctgcacgaggttgacctgctgattaccgatcggctgcctgatcaggatttttgcgatctgctcgaccggcacggcgtagaattgcttgtaactgaatctgaagaagaggatgaggacatgtgaaactgattgccatagatctggacggcacactgctgaacagcagtcatcaagtaagtgatgaaaacaagcgggctttaagggaagcccggcaagcgggaattgaaatcgtggtttccactggacgcgcgcattttgatgtgcactccatatttgaaccgctcggcataaaaacatggattatcagcgcaaacggagccgccatccacgctcctgacggcagcctgtaccattgtgaagcgattgaagaaacaagagcccgggggattttgtcatggcttgaagagaatcaatattattatgaggtgtttacaaacaaagccatctatacgcctgaaaccggcaggcagctgctcgatatcgaaatggaccgggtgaaaagcgccaatccggaaaccgatctttccgttttggaacaggcggcttcagtgcaatacagccagtccggctttgcttacattcattcataccgtgagctctttgagaaagaagagcatctggatttttataatattctcggattttcgtttgatgagcggaagctgaaagcgggctgggaccgattcagcggtcagaaagatctcacccttgtcagctctgccgatcacaactttgaagtggcgtctcgaaacgcctcaaaagggcaggcgctcaaacggctggcgcaaaagctcggcattccgatggctgaaaccgccgcggtcggtgacagcttaaatgactattcaatgcttcaggcggccggaaaaggcatagcgatggggaatgcgagagaagatattaaagagatcgctgatgccgttacattgacaaatgatcaaaacggcgttgcgtatatgatcaggaatttactgtgaaaggtatggcgatactgttcatgactggcgtgacgcattcatggcaaatgcggcgtaacagtaaggacgacataaaagaccggctcttccgagagagccggtctttttgcgtttaatgtgattgcgtcgatgcgctgagggtgaataattcttcaagctcatcggatgacagctcggtaatccaattttcactttggataatctgatcgttcaaagtttgtttcgtttcgagcatggcatcaattttttcttcaatcgttcccgtcgtaatgagtttgtgaacgtggacgaaccgttcctggccgattcggtaggcgcggtcggtcgcctggttttccaccgccggattccaccacctgtcatagtgaatgacatgattggcagccgtcagattcaggccggttccgcccgctttcagtgacaaaatcagcgtcgggtattctttcttctggaaccgttcgacgagggaatcgcgttcctgcttggacaggcttccgtttaaaaactgaaccggttctccgaatgttttttccaggaggcgcttcatcatgttgcccatctgaatgtattgtgtgaaaatgaggcagctttccccttgtccgcggatcgccgccattaagtcaagcagcttttccagtttgacggatctcccgtttaacagctctgtctgttcttccttcaaatagagcgcaggatggtcgcatatttgcttcaagcggccgagcatgctcagaatcagcgctttccgctgcatcccggtcagagaagccatatgttcaaatgtatctttgacaagctgttcataaagggatgcctgttcggctgagagcgggataaactctttttgttccagcttgtcaggaagattaagcgccacttcttcatcccgttttgtccggcgcagtaaaaacggccggattaactgctgaagctggttgattcttttttcgtcacggtctttttcaatcggcagcacatagcgtttatgaaagccggtcagactgccgagatagcctttgttcataaaatcaaagatcgaccaaagctctgtcaggcggttttccatcggtgttccgctcagcgcgatatgatggacgcctttcagctttctgattgcgcgggactgcttcgtatgcgcgtttttaatgttttgcgcttcatcaaggcagacggtgctccatgtcacggaagaaagctcttcctgatcggcgtgcgagaggccgtaagaagtaagaacgacatccgcgtcctgataggccgggacaaatgcttcccccttcggcctgcgggggccgtaatgaagcacggccttcagctgcggcgcgaaggtctggagctcacgctgccagttgccgagcaccgatgtcggcgcaatgattaaggcaggcgctttttgccggccgctttccttcacatggagaaaataagcgatcatctgaatcgtctttccaagtcccatgtcatctgcgagacaggcgccgaagccgttttcccgtaaaaacagaagccagttcatgccgtacatctgataagggcggagctggccctgaaacgcggcgctgacttcatgctccggcagatccccggcatccgtcagtttgcggatcaggcttctgagatgctttgataattcgatcttgatcccggcaaatgccgatgagtcaatgatgtccgtgtcctcggctccgttttccccgtgatccatcagttcgcgcgccagcacgtcggacatgtggaggccctcagattccgctttttccatcagtattttcatctgtttaataaattgcggatcaattttcacccattggccgcggatgttgacgagacgtctgttgtttgcgacaagctcattgaattcatcctctgtcagctcaatcccgttcgtggcgaatctccagttgaaatcaagcagagcgttcatgccgacgaaggactcgccccgcggggaggatgacactttcgccttaagcatcatattgctgtcccggacaatctgccaccatgatgggagaagaatctccacacccatatcgacaagcgtctcactcgcttccgataagaagatccaagcctcttcttcagatatcagcgtcgttcctgaatcaaacgaaagccagggaaccgttctgcggaagcggtcctgttcacgcgcgatttttccgctgtatgcctgccacgcttttttcagccctttcagtccgtcgaaaaaggtgatggagccggtttttttctcacgtaaaaacatctcgattttccagtcgtcaccgtcgaaatcaggctcgtttaatcggaggccgacggtaaacggcgtcagatcgtcatgccagccgattccctccagaaaatcctcttcatccaaaaaggagcctttaaacgtatgaacggccggcgaacgggtttcgatccgccgccatttttccagcaggtcatcattgtactgaatgtagtcctgtaccgcggctgagaaccagtctgccgtaaagccttccagcaaaagctcgcggtctttgaagcgcaggaggccattttgccatgcgtcataatccggaagaaaatcgccgtcggcaataaattcgtatatcgtcgaagccgcttcgattaacggttccgtttcctttgtcagctgcacggtgctgaatgaattgaacgagttttttccaagcagctcgacggtcatccaagggctgagcagaacggccggagtgccgatgaagctgacgtcttcaagaaacgttccgtaaaaggtggactcatgccattggaacaaatgagtcttcatctgactgagagtaagcggctgctccttctcatcatggcttgacagcgtaaatgtccaatcttccatttgttctacatgaatgaaaatttccttaagactcgccatcaatcaactttcctttctgcaattcttcttgaagggcgcgcagcctcttgtagcttgcgctcagccggctgatataacgctcccatacctgctgtttttttgcctttttataaagcgtccgcagttttttcagatggcgcgcagcctctttataggcgctgcggtttttttggtcgataaaaaaggccgccgcccggtgataggaggggatgagcgcttccggatcactggcggcaatttccttcaggatgtccttttcaatttcccagacggaaaaaccgacgaggctgtgaatctccacccattccgcgtaccgccgtttttcgtacaggtactggctgtattcggtaaaggtatagggaaggcagccggaagcaaaccgttcaaacagctgatcatcccgtgagtgccgcgcataatccgccaacagcgcaaacagctctccgatgatgtcgcgcatttctttaaacggcttatcaagcttcgtatagttcacggcaagcggttcgatccggccataccatgttttcagccgtttccagtcttttttcgcggtgagttcaccgagccattgaaaagtgtacggcagcgcttcaggagggaagcgggacatatcttcaaagaccgcttcatcatctttttgcaaaaaggccagatgaagccgtccgaaccgcacttccggcgaaaaacggcgcccgctttcctgttcgagaatctcttgttcacgcgcgacccatttcggccggttcaaaagcgcgctccacatttcaccgaatacccggaggcgttcgtattgaaaaagctcttctttcacaagcagtctgcggagcaccgggggcgtccggtctaaaaaaggatcgagtgaaaaagacaaggcgtacgttttcagtctgtcaatggaggaataaatcgtatccatcagctgttccacgtatggattaatgctgtaataatctttttcggcatccaatctgcctgactcaatcaaagtgaacatgtgaagccagacggcaagcgccgaatgaatctgatataagcttttaagctcgggttttttcggggcgtgttttttgagcgctgacagatagccgtaataaaggccctgcatcgtctggcttccggccggcgtccgcgcctcccacagcgagaattccgaatcaaaaaaagcgagccagcttgacagcgactcttcattcggcagcactttttcctgaaactgccggcggacaagctccctgctttcctcaagcttttctctttccagccaatgttcggtaaaggtaccgacccgctcgaattgggcatatacgtaaagaaaaacggcgagcacgtggcggcagatcgcctcagacgggcatgcgcagccgcttttcaccatgaaaaataagttcagcgtgacccttacaggcacaacatcctgcacatatgcggaaatctctgtcggggtttgaacctgtatacgatagacggaatcctgccgatataaaatgagtgctttcttcatcagctgaacattgtcttcattgtaaggaagaagttctttaagctgttcagccgctgcgagcacatcttctttagcaatcatatcctgaagcatgattatcgctcctaacgagtcacaaaataaaaagattccaattcctctattatatcgcaacacatggcccggaaaaagtttttcctaaaaaaggacataaaaacccgaatgtgtcgaatgatgtattagagattgcaaaacagcacccgacagcatataataatcttgttttcaatttaatggaagccgaaaggaaacgaatgatgaagaaaacgaagttagatcaagaggagtttctgaagattttaatgcatgcgcacgacatcggtgagcagtcctctgagatgaccacaaaagaaatgcttgagaatttgatttcttatattaaaaatggatatgcaacataaaatcccgcagcctcctggccgcgggattttttaatcttcctgtgacaccagtatttaaagcgcttacaaatataatacagattgaagtgattgtctatttttgtcgaattttgtcatttgaaaaggttagaaatgacagtttaaagctgtataatcgtaattggaaaagatcattggagggaatgggaatacacggaaagtgatatggaggttatatgggagaatctgcaagcataaaggaaatattcgcaatactgagaaagcgtctgctgtttatacttattattaccgcggcggcatcttccgcaggcggtctcatcagtttcttcgctcttacgccggtctatgaaaactcaactcaaattttggtcagccaatccaaaaacaatcaaaaagaagtccaattcaatgacgttcaaaccaacctccaattaatcaacacgtataatgtcatcatcaaaagcccggtcatcctcgatgaggtgattaaacagctgcatctgtccatgacttcgaaagagctggaatcgaaaatcacggtatccagcgagcaggattcacaagtcgtgacgattgccgttcgggatacggatgctaagcgggcggccgttatggcaaatgcggttgcatccgtttttcaggacaagatcaccgccatcatgaacgtggataatgtcagcatcctttcaaaggccgaagtgtcggacagccagtcaccggcagagcctaaccgtaagctgaacatcgcgattgcgtttgccgccggacttttgggcggaatcggtctcgcctttttgctggaacatctggataatacgatcaaatcggaagaacagctggaagcgctgctcggcatcccgatcctgggaacggttacttcaatcagtactaaagacagcgttgccaaaagcttgaggatggcggaaaccaaacaagcgggaggcggacatgttgacgcgtaaaaaagacaaacccggaaaacgaagcgtgattgcgatgtctgagccgaaatccatcaactcagaacaatatcgcacgattcgcacaaacattgaattttcttccgttgatacggaggtgaagtcccttttgatcacatccgccggtccggaagaaggaaaatcgacaaccgcggccaaccttgccgtcgtatttgcacagcaggggaaaaaagtgcttttaattgatgcggatctgcgcaaaccgacggttcatttcaccttcaaattggataacggaaccggattaacgtcgctgctgttaaaacagatgccgtttcagaatgccgtcctgccggctgatgaagcaaacttggatattttaacgagcgggccgagcccgcccaatccggcggagcttttatcgacgggtgcgatgaaagatcttctgtcagaagcagccgcagtttatgataaggtgattttggatacgcctcccgttttggccgtagccgatacgaaaatattaggcagctacactgacggggccattatggtgatctcaagcgggaaaacggacaaagaaaaagcggccaaggcgaaagaagcgctcgattactgcccgtgcaagctccttggggccgttatgaacgggaagaaacaaacgaaacattcggactacgcctattacggacaataatgtcacaatgggcgcggtccattctttttaaggagggattgaaatatgatagatatccattgtcacatccttccttccatagacgacggcgcggcggatgatacagaaagcctgaagatggcgagagaagcggtcagacaggggattgatacgatcatcgcgacgccgcatcatgtgaaataccgctatgacacggatcggcatacggtcaacgaagcggtcagcctgttaaacaaacgtttgaataaggaaggcattccgctgactgttctgccaggccaggagatcagaatagacggagatctgctggcaggtcttcaaagcggctcgcttgccccgctccataatacaaagtatgtgctggcggaatttccggcggatcatgtcccggcctatgctgaaaggctgttttatgaactgcagctgaacggatatgtccccgtcatcgcccatccggagcggaacagggaaattcgcgaaaatccttccgtcctttacagtcttgtgaagaaaggggcggccgcccaagtgacggccggctgcattgccggagcattcgggcggaaagcgaaatccttttcgctgcagctgatggaagcgaatttgatccactttctcgcatctgacgcccataatctcggaccgagaaatttttattatcaggaggcgatcagcgttctgaaaaaagaagcaggggcggagctgatttacatgctcacggaaaatgcggcgcttctcgctgaaaacaaagccgtttataaggaacctccgctgcctgtggcccgccgtaagcgctggggtcttttttaatcgtcgtctccatcccgtttaaatgaagcgtaagcggctgttttgcaagatgattcttttatgcttatgctattatcagcggccggcgccgttttttcctatcatgacctcaggctcccggcattccgccggtgccgggatcatatgataatagcggtaagctgcccagcagcaatttctaaacggttgggggaacacgatgaaaataacagtgatcggaacaggctacgtcggtcttgtgacaggagtgtctctttcagaaatcggccatgacgtaacatgcatagatattgacgaacgtaaggttgagcagatgagaaagggattgtcccctatctttgaaccgggccttgaagatatgatgaaacgaaatatcggccggcatcggctggcatttgaaacgagctacgaaaaagggcttgcggaagcggacgttatttttatagcggtcggaacgccgcaaaaagaagacgggcacgcaaaccttacttatattgaaaatgtcgccgaacagattgccgaacatatttctaaagatgcgatcgtcgtgacaaaaagcacggttcccgtaggaacgaatgacagaatcagcgaagttattcattcacggctgagagcggacgtgaacatttcaatcgcttcgaatccggaatttctccgtgaaggttcggcgattcacgatacctttcacggcgaccgcatcgtgatcggggctgaagaccggcagacgcgggaaacgcttgaccgggttttcgcgccgcttgcgattccggtatatcatacggacatcagaagcgctgagatgatcaaatatgcgtcaaacgcatttttagcggcaaaaatcagttttattaatgaaatttctcatatatgtgaaaaagtcggtgcggatgtggaatcagtcgcacacggaatgggattggataaacggatcggcaatcaattcttaagagccggcatcggttacggcggttcctgttttccgaaggatacaaacgccctcgtgcagatcgcgggacatgtggagcatgattttgaattgctgaagtccgtcattaaagtcaacaataaccagcagtccatgctggttgataaagtgctgaacaggctgggcggtgtgacggggaaaaccatcgcgttattagggctgtcttttaagccgaatacagatgatatgcgggatgccccgtccattgtcattgcggatcgtctggcggctcttgacgcccggatgacagcgtacgatccgatcgcgtcattccgggcttccgggctgcttccgtctgcggtttcctatcgggagtccatagaagaagccgtcaggggagcggatgccgtcctgattctgacagattgggaacaaattaaacacttcccgcttgaagcgtacaaagagctgatggaaaccccggttattttcgacgggagaaactgccactcgcttgaggaagcggaacaggcgggcgtggaatatatctcaatcggaagaagagccgtcgtgcctcagactgattctgtcacttgaaaggccggcggtccgcgccggccttttatcatacaatcattagagacgaaggagatattaatcgtggaaaacacatggaaattgccgaagcaaatggaatcatcccgcggtctgctggaaacgtcagcacggccctttatcaaactgcacgtcaaaaaagctgaaacgggactgtatgacaataaaattgccggagacccctattttccgaaacatgaaccataccctgaagatgaaagcggcaggccgatgaagcttctcgcccaaatcaattttgcggatatgcccggactacctgattttccggacaccggcattcttcagttttacatatcggtcagtgatgacgtatacggtttgaattttgacgacgggtgcgcgcaaacgggtttctgcgtcaaatattttgagcacgtgacagatcgggaagaggagctcatggatgatttttctttcgttcaggttgaagaggagtacgattttccgattcaatccgaagcgctgatcacccctgagctgtctgctgaatgggcgctcccgtctgattttcaattcaggcaatatgccgggatggatgccttcgactatttcgagcagtttgacgatgaggtgtatgacgaatatacggtgaacgcattcggccataaaatcggcggctatgcgtccttcacccaggaagatccgcggtcttattcccatcaaaaccatacgattctgctcttgcaaattgattcagatgatgacattgattcgatgtggggagatgtgggaatcgccaatttctttatcagaccggaagatttgaagaaaaaagatttctcaaacgttttgtacaactgggactgcagttaacgacattattagaatcatgatacaaggcaaaggagacggttattcactgtctcttttttttagggaatttatcatggatacatagaggagatcaatgaatggatatgccgtttgtgtgagtcttttggcgttaatgatgagcatctcggctgctgaaaataagtcatttaacctatttaagctgctttctgtctattttaaaatataatatatggaaatatagtatggaaaagtctgtgctttttgtacgactttttgcgtaagacgaggtgaaaacagatgagccattcaagcacattaagccatattaacagcaccatcagccataaactgggcgagatcgaacaccaaattgataaattaaaagaagcgaaaagagagatagaatctctgcaggaagagggcgtgtctgaaatcagggacatcctcaggccgcacctggatcatcattggaccggcacttttgctgaagaatttgatgaccggcgcgatcaggcccatacagaagcatacagaatcgtcacagacaaatacgacggttatatttacagaatcggcttaaagatgacacagcttgaaattgaaaaaggagggctccttgccgccagaagcatcgcgagagaggcagagcacctgctgacgctgggagaagaagcccttgacacggtcggagaaaaaatacaatcaatcaaaaaaagctggagttggttttaatggcagaaataaaactcaaatacggagccgtcatgaagcagcttgaatccgtcagcagcgctttggaggccgtttctatcgggaacgccggtacaaacggaaaaaacaagctcgactatacctccaaataccaatcccgcgaggcaaagcttgtatcgatgatcagcgaatacaagcaggccgttcataagaacatagcggacgttaaagacaacgtagattctttgaaggaacaggacgaggcgatcgctgtaaaataacgaaagaaaggacttgccgatgagcaaagtgtttgaatcacaatcgttaacggacgaagcagataagagaaagaaacaatacgaagcccttgaagaacagctgcgtgcgctcaaacaagcctttcaaggcgtggccgatctgggtgatgctttgaaagggaaaggcgcagacaatataaaggatttctttcagggacaagcggaaatcgccgacagctggctgacgcttgtctctgctcaaattgcgtttttaaatggcatttcaggtgacattaaagatcaagagctcagtgattcatatgcggagacttcatttttagagcatgagctgcccaatgcggatttgagagcttcagagattgtctccgctcataaagcagaaatcgattcgattttgtctggcatcagtgatattattcatctcgatacatatacgctggatgattacgcagataaaatgggtgatgcccagaaaaccagacgcgacacgatcacggcagtcgatacgcttgatgaatccctgaccgctgaatatcaaaacttagaatctctggacaacgcagtgctcagcaaatattcccttctcatgcaggccaccagcaacgggaaaagcgcctcccctatgtactatgacaaaaaagccttccacagcaatgaaatctacaaaagcgtcatggcgacagaaaaacagggcacggactatattgacgcaaaagcccagcaggccgaagcaagacggcttcaggaaaaggctgaagaagaagccaataaaccatggtacgaaaaaacatgggacggcatctgcaactttaccggcgaagtcaccggctattatgattataaaagagcagccgaaggtgttgatccggtgaccggcgaaaaactctccaccgcagaacgcgtcacagcaggagcgatggccgccgccggattcataccggtcgtcggctgggcgggccgcgctttcaaaggcggaaaagccatttacaaaaccggaaaaaccgtcattgccgcagaacatgctttagatgcctataaaaccggaaaatccttagacattctcaaaatgacagaaatgggcgcatacggcctcgtcgcctcaaacggattcacagaagccgtcacaggacgggatatgttcggaaacaaagtgtctgaggaaaaacggaagcaaggggcgctggaagctgcgctgagtttggttggagccggtgcattggcgaagcatgtaaacaaaggcataccgcttgcaacccattcaaaagttcaaaaagctaacaagacactagaaaaagttaaacaattcaaagtcccgacaaacgtccgcgtgtacgcagaacgcccagtaacagcgaacggctttacgtacggattcccaacagtccgtgtcgatgtggaaaagacggctgttaaagaacttgggattgtgaagatggcgagtagccagtcaaaaaaaccaaaatggttggaaaaacctgaggggatgactcaaaatgattatgttgctcataatggtactaactacagtaaaaagaaacggactgaagaatacaatgctgcgctagctgataaagagaagatagttggagacaattcaaatggatatcgtttaaaagaaccaactaactggatggaagaaagaggtatgatacaaataaaagaaagattaaaaagaaaatcttggtcagatagagatgggtttaattggcaatgggattcccagcatggtaaattagaaaagtggaaccgcagaagaacagagcatttaggagagtttgatcctgtaactggtaagcagacgaaaaaaggcgagccttcaagaagatgggatggttaaaactatggaacatggaatcagatttattaatgaataccctgaaatcggtgaattgcttcatcgtctatttgtgaatagggaattagacgaatggtacaagagcaaatgcgcagagaaaataaaagtacctgatgaatttaatcaaataaaaggtttgaaaaaaattgaagttagagatttaaacaatccttcaggagaaattgatatccatttgcaagatctttctggggaaaatggttttcatttagaacagcaaatcaatatgaaagtatctaaattggttcctgtttatgtattagattatagttattccctaagacacgatttaatagatggcgcttatgacattgtaggaaccgctgaatctttagaattcattcagggaacgaactatattaataaaataatgcaagagaaagggtttatcgaactcagttatttgtatgattactacgatactgtgtatgagtggagtgaattgccacatatacagcctttcaacaggagattaacattaggagatgccttgtttactgatgtattagaattgctatagttaagagcttgccttgttgttatcggcaagtttttttataataatttaacaatgtggagtacaaggagaagcagttatggatagagaccatatttctcaattgctgccattaaaaatctgtaatggctggtctgtagtactgaacaatttaagttcagaaaaaagaatgcaagaaaaatatgaattactaaaactacaaaatgaaaaacgtaatgctgttattaaggtaatatttgaaaatgattaataccatgtcatagtagcgggcttaaaaacagataagatttataaagaagactcttttaatgaaatagaacaattattggaagagttggaatatcaaatctggactgtgggaagtggggttttagagggtttgcagcacctaagccaacatgttcccaatttcttaaggcttaagataccagcggggtggactgttgattatattccattaaaagatactgaccctaaaactctagaggaaaatgatgatgcttggttatttgactttaatcaagatctcctgcagtttctcataaaactaaaaatttgctgcttgtagggtggtacccagaaggggatccaaccggcagttatggcattgaactgataaaaaacaaagattgggaaaatcctttagaagatattatgtgtactgaacttaaagaattacttaaacaattggatcttatttttatgaaagaaatgaaaaatgaattttaataaaaagcagattatactatctgcttttttcaatgaagcatatggagtcttcgctagatcgaaacacaggacgattgagcgcgaagactattttaagagaggaaaacaagtgaaatgaaaatacatcaaattcacgattttgaacaaaaagatgaatcggattttattcgaactcaacaatctcttatacataaaatcaacctatcccccgtcatccatccagactccgtcaacaccagcgcaggcgtcgacctcgcttattgggagcaggacggggaaccgtacggggtgtgcagtatcatcgtgattgacgctgatacaacagaagtgattgaaaaagtgcacagcatggggaaaatcagcgtgccgtatgtgtccggttttcttgcgtttcgcgagctgccgctgatcatcgaagcggccaaaaagctggagacggagccggatgtgtttttgtttgatggcaacgggtatctgcattacaatcatatgggcgttgccacccatgcggctttttttctggggaagccgacgattgggattgcgaaaacctatctcaaaatcaaaggctgcgattttgagatgcctgaaaatgaagtaggcgcctacaccgatattctcattgacggcgaggtatatggctgggcgcttcggacacggcgggacgtgaagcctatcttcttgtcttgcggacataacattgatttagaaagcagctatcagatcacaatgaaaatgatcaatcgagaaagcaggctgccgatccctgtccgtctggctgaccttgaaacgcatgttttgcgaacgttttatcggaaaaatcacatgaaacacttggagctctaagccaccaagtgttttttttgtatgcctggtgtctgctttaaaaaaccttgtcgtccttgcagcaggtttttatttgaatgtttttcgcgtcaaatcgataaatgcctttaatggcgcagacatccacttgtccttatgccatgctagttgagtaaaaacggggcattcattctgccagttgagttctttcatccgtccttcggcaatatcgtcttttactgtcatttcaggcaatagtccgattccgagtccggccatcacgcattgtttgatggcttctatgctgacgaattctaatttattagggtagactccggcgtcatgtaaagtgttctcaaagagcgtgcgatatgaacagccgtcctctgtcagcagaagggtttcattttgaagatccttcaatgctgctggtgagtctgctggaaaaggatggtcattggcggctaccattttgatttcatcctgaatcagagattcaacgtgcagtgcgtcttccgaccgattcacatccaaaatgaaagtgatatcaagctggccctgcaagagctgttctttcgcttgttcgttggaaatatacggtttgaatataagctttacttgaggaaaagcctgtttgaattcttttatgataggcggaaggcggtatgtgcactggctttccgtcgcgccgattttcaaggttccggttgtttctcttgcttgatttgcggccatttttgcttcttctgttaacgcaatgatcttctccgcataggatttgaacgttttgccggcttctgtcaggaaaagccgcttgccgagccgttcaaataaaggagtcccgatttcttcttccagtgatttgatctgagaggtaacgcttgattgtgcatagttaagcatcttggcggttagggtgaagtttacgtgttctgctgcggtaataaaggtgatcagctgcttcaattccatttgatctcgccctttctaaatcggttttatcgattggaataatcgaaataatcatctgtattgattgatgaatccattatatgatgaagaaaatcattcgtaaacaaaggagcagatgcatcatgaacattgcggttattcatggcggaacgaggcctggcggaaatacggatattcttgcggagaaggctgttcaaggattcgatgcggagcacattcatttgcggaaatatcggatccggccaattgaagatctgcgtcacgcccaaggcggctttcgtcctgttcaagatgactacgattctatcattgagctgatattaccgtgtgatattcttgtattcgccaccccaatttattggtttggcatgtcagggacattaaagctgtttattgatcgctggtcacagacgctgagagatccgaggtttcctgattttaaacagcaaatgtcagcgaagcaggcatatgtaacagcagtgggcggagacaaccctaaactaaaagggctgccgctgattcagcaatttgaacatatttttcattttatggggatgtcctttaaaggctatgtgctgggagaaggcaatcgtccgggtgatattcttcatgatcaacaggcgctgtccgctgcgagccgtttattgaaaagaagtgatgcgatatgaagctgctgctggttatctctggtatgttgattcttgcactctttctagcttggaaagcgccgacttctgtttggatacaggctgaaaccaattcacctcaggttcagcaatctgtgagaatggcaggcgcaacgctgcaagtcaagcaaatcatcaagagtgatgcaggcgaagaaacagttgtcatatcaaatggtatttccgggccaaaataaaaaagcacctgtccaggtgcttttctttataaatgaggaatcacaagccctccatacaaaaacgccgcgataatcagaaaggccggatgcatcttgaattttgtcaagacaaggagggaaatccccgcaatcactatcgcttgaacccagccgatcgctttgatgccgtctgcgccgatttgccaggtaagaatgagcatcatgacggcgatgacaggctggacggacagcgtcatacctttgatgacgggggattggcggaagcgctgaatgacgcgcaagaggatgatcaatgcgagcgccgacggtacgacggtggcgatcagcgcaatcaggaatccgggccatccgcctgcgctgtagccgacatacgccgcgattttggttgcgatcgggcccggcaatgcgttcgcaagtgcgagcatatttgagaattgatcgtttgagagccagctgtatctgttgacgacttcttcaaacatcagcggaatcgacgccggtccgcctccatatccgagtacgtttgcgacaagaaacgccataaatacataaatcaagatcatgaggccggcattcctttatcttttgaacgtttctttgtgattttgtcctttaatttaaaatgaaacgcgccgtatgccaagaaaatgataatgacaaagccgggattgatctgtaacgtttgcaggccgataaaagcgatgataaaaaacaggatgcccgtgacccagccgaaacctttaagcgctttttggccaaactcgtacgccatgatgccgagcatgacggcgatcaccggtgttacggcgccaatcatgccggcaacgattgctgagcggcttaagacattgacagccgcaaacaagcccgccatagcgagacatgtaggcagaatatgtgcgagggttgccgcgattgcgcctaacgtgcctttcagcttgaagcccagatacgcagccatttttgtggcaatcggtccgggaagcgcattagcgatcgctaatatttctccgaattcatcatcatctatccatttgtatttattgacggcttcatggcggatgagcgggatcaccgacgggccgcctccgaatccgagaatgcccgttcggaccatcgccgccgtaatgtcccaatagggatgtttcatggctatgtcctccttacagcttcatgcccgttctgcttttataccgtttaatcagcatttggcagtcgacgctgacgacgcctttttgcgtatagagccgttttgtcaaaaactcttccatctcctgatcatttgcgaaaatgccgtgcatatgcagcttgctcggtccggtcatatgataaaggcttgtcaccgccggctccttttcaagctttaatgcggtttcctccaaatactgcggctccacctccacgttaaaaaacacggacacatgacggccgattttcgccgggttgatgacagcggtgaatttttcaatcacaccggcatccagtaaatgctgaatgcggtgctgaaccgccactcgcgacaggttaacccgctttcctaagtctgtataggaaatcctcccttcctcgtgcaaaatcgagagaatctgtttatccgtttcatcaaggacaagattcggaatgctgtactcatgttccaaccggcttcaccttccttcatttggtggatattattgtatcatgaaatgttacggtatgaaggggaaatttttttattgttttcgttacgtaataacttaggattatttcttatcggaaagtaaatagtgtgtgagcttttctttcaggaaggtggataccggtgaagccgctttttatacttaggaaaatttgtaaaggggcttgccatgaatacttcaaccatcggaacgaaacaaatggtcgtcagtccgcattatcttgcttctcaggcgggggccggcattctggaaaagggaggaaacgcgtttgacgcggcagtggcggtcagcgcctgcctggcagtcgtgtatccgcatatgacgggtcttggcggggattcattttggctcacttaccataaagaaacgggacgaatcaaagcttataacgggagcggccgttcagggaagcatgtgacgagagacttgtatcggggcagagaagcgatccctctgcgcgggccagaaagcgccattaccgttccgggaatggcggacagctgggatgccgtgctttcggcgtacgggcgtctttcgctcgctgaggtgctgaagcctgctcttgattatgcggcaaacggattcccggtgtccgccgaccagtgcgcccacacagaacgcaatctcgctcttttagcctcgatgccttacacctcggccatttttacgagaaacaaaaaagcgcccatgcccggtgaacggtttgtccagaagaatctggcggccagcttggaacagcttgccgagaaaggcagaagcgctttttatgaaggagatctcgctcaaagcatcacatcctttctgcaaaacaacggcagccgtctgacacttgatgactttaaagcccaccgcggcgagtggacgaacccggtatcctctgattaccgcggataccgcatctatcaggctccgccgaattcacagggctttacaggcttaatgacgctcaatatattggaaaactatgatttttctcagattgaacacggctcctttgactattatcatctgctgatcgaggcgctgaagaagagttttcagcaccggaatgaagtgctgactgatccggcattttctcatattccgctggatcggctgcttgataaacggtatgcaaagcagctggcggaagaaatcggtgacacggctgcgccggcgctaagccgtccggtcggaagcgacactgcttatgccgccgtcagagatgcggaaggaaatgccgtttcctttatacagagcctttattttgaattcgggtcagccgttacggcgggggagacgggcattctgctgcaaaaccgcgggtcatttttttcgctggatgaatcccatgtcaatacacttgaacccggcaagcggacgttccacaccctcatgccggcgatggcctgtaaagaaggaaagccgcacatcctgtacggaacccagggaggagaaggccagccgcaaactcagacagcgatgattacgcgcatcattgattacaaaatggacccgcagcaggcgatcaatgagccgcgctgggtctgggggcggacatggggagaggagtatgaagggctgagggttgaaagcagaatcagccctgaaacgagagaagccttaaggcagagcggccaccgcgtcgagaccgttggtgattttgacgggcttatgggccatgcggcagcgatcgtcattgatgaagaaggctttctccaaggcggggccgacccgcgcggcgacggagcggccgcaggagtatagagcatgatacgctaactgatgaaaaaaataagcacgccaagagcggcagaaagacctgcgtaaaacgaatcgtacacatattgcttttcctcccgccggtgccgccattccattaagccgctgcagcaaaatagcatgaaaacaactcccgcaaatacgtacatttcattgaacaaagtcaccgctgcgatgcccgtaataagcagtgtgatttcgattaatcgatgtgtgccgtttatcggcttctgctttttaacagcctttggaaaatgaagaactttgacggcaaatacttgaaacataaggctgagcaaaataaatacggctgaaaaaatcagtaactgaatgaaatccatcgtctcctcctaaaaatgtcactcgtttcatatgggtgagggccttgtaagtttcagcattctataagacattaggctgagtttaatggtaaaagactcaaaaaagacccctttcgaaaggggtctttttgactagtttcttctattataatggttcctgcttcaggtcgggcggacaagcgtatatgtcttcccgagtctgacgtattcattccccgcgagccttgccgcaggcttcagctcatctgtccgtatgtagcctttatcggcgtcatatacttggtcattcaaatgaaaacaaacgactctgccgatgatgaggtctgtcgtcgtttctccgctgtcattttgaaacggaagatggcgttcgagtatacattcaaacctgacttttgcttcttttataccgggaacgctgatgcaggcgctgtctgtcacagaaaggtctgtcatgccaagttcactgacatcaggatcaagccttgccgccgttttgttaatgtcttcaataatggactcatcactgacgtgcaccacgaattcccgatgagcgattgcgtttctcgcggtgtctttctgccgtccgtccgcgcggctgacagagatggccagaagcggcggttctgcggagacaacgttatagaaactgaagggcgccgcgtttacggcgccgttgatggatgaccgcgtcgtgacaaatgcgatcggccggggaacgactgtgcccgaaagcaatttgtaggtgtcttttgcgttcagttcgtctgctcgtaagatatgcatgatttcggccgcctttctttatcgtatgacctgattatacagaaagaaaattcggaaacacaacaaaagaaaaccggctgcatatcttatcacgtggcatatatctgattgaggaaaaaggcttccgtttagccggcagcctatttacaaatggcgttacttgtagtttttctttacaacccagatgttcccgtctttccagtactctgttttgctgcagtaatcgtcttttttgcaagggtcttttttatgaggacggtaaggttttttctgcgtgcgttttttcttgcggcggcatgattttttgtggctgcgagattttttgtgagaacgggattttttatgactgcgagattttttgtgagagcggcgcgattttttatggctgcgagattttttgtgagaacgggattttttatgactgcgagattttttgtgagaacgggattttttatggctgcgagattttttgtgagagcggcacgattttttatggctgcgagattttttgtgagagcggcacgattttttatgactgcgagattttttgtgagaacgggattttttatggctgcgagattttctcttcttactgctttttggttcttggtacaaataatcttccaatccctcggtgcttgcggactttactgcttcttcgatatcagaatgggaatagtggcccattttgaaacctcctcatgatatatgttttaaggatgcgatccttactaccacatagtacgcatgaatgaaaaaagtgtatgtgtgattcgctgagttttatataaatagcacagcctaaattaatacagggagggttactgatgaaagaccaatcaacattgcctctataccagctgtttattcacccgaaagacttaatggagctgaaaaaagacatttgggatgatgatccggtgcccgcggtgctgagagtgaatcaaaaacggcttgacattgatctggcgtaccgcggctctcatataagagattttaagaaaaaatcgtatcacatcgctttttattcgccgaaaacatttcgcagggcgaaagagatacatttaaacgctgaatacaaagatccgtcgatgatgcggaataagctgtctctcgatttcttcgcggagcttgggacgctgtcaccaaaggcgaatttcgtaaccctgcaaatcaatggcagacatgagggggtgtatcttgagctggagtcagtggatgaatattttctggcgaaacggaatttggcggacggggctgttttttacgcggttgatgacgacgccaatttctcccttgtcagtgatctggagcgggatacgaaaacatcgctcgaacttggttatgaaaagaaaacgggaacgaaagaagacgatttatacttgcaggacatgatctataaaattaataccgttccgaagtcagagttcaagggggagatcgtcaaacacttggacgccgataagtatttgcggtggcttgcgggcatcgtgtttacctcaaactacgatggatttgttcataattacgctttgtaccggaatcatgaaacgggactttttgaagtcattccgtgggattacgatgcgacgtggggaagagacattcacggtgatcggatggaggccgattatgtcagaatacaagggtttaataccttgactgcaaggcttctggatgaaccgtatttccgcaaagcgtacaaacagcttttggaagaaacgcttcagacccggtttaccattgaacatatgaagccgaaggtcatgtcactgtatgagcagatcaggccgcatgtcgcaaaggatccttataagaaagaggagattgattgctttgaccgggagcctgatgtgatttgcgaatacattaaggagcggtccgccttcatcagcagtgagttagagcggtggaatatctgatttggaaatgaagaaagattttttacaaataggctggtgaatcagttcccgaaaataatcgtgatacgtatatatgcattatgctttttacattatgagaaaaatgactaggaggacaatagatgaaacgcaatacgaagcggcatcggtctgatgacaactttttgcatgcgatggaaggaaaagtaattactgtctaccggggaggcccggagtccaagacagggagattagcagacattcaatcggattatatcgctcttcaagttgataataaaatcgtttattatcaatggaaacacgtgaaaagtgtgacggaaaatacgagtgaaaccgtatcgccggccgaagcggcagaatgtgaaaaagctgatgattttcaagatctgatcagccggatgaccaatcgcacggtgcaattgaatcagggaggtccggaatcgaaaagaggaaagcttcacgaaacaggggatgattttctcgtgctggaaacagaagatgacggaatcgtatattttaacgccgatcatgtcaaaagcatcagcgcggaacaagaagaggacggccaggaggaggagcgcccggaatttgaaatggctgatgattttcacggcatatttaaacgcctgatccacaaatgggtatccatcaaccgcggaggtcctgaagccgttgaaggtatacttgtggataattccgacggccactacactcttgtgaaagataaagaagtgctgcggatctatccttttcatatcaagagcatcagcgaaggggcaaaaggagcagccaaaaaagaggagaataaagacgacgagaataaaggcgggaaagagagcgccgaagaagaaaagtcacatgaagaagaatctcgcgaagagcagcgtacttcctctaaaaagtcgaaaagatcgtcaagatccgttcgatcctcaaaacgggaggaagagaactcttatagctacgccactgtattaaggacaatagattataggtggaaacacggccgtaaatgattggaaagattgtccgtaaacgcgggagaggggggaatgaaatggctggattaagcagatttcttgataaacaagtcgatattgagatatcggggaatacgacattttcaggaactcttttggatatcggtcaggatatcattgtgattcatgacggccggacgtttctttatattccgctgctgcatcttcagaggatgacattgacgctcccggacgaagagaataaagaaccgtacgcaagaaaaaaaagtccgcatcccgaaaaacaggaacattccttttcttaccggaataccctccagcatataaaaggcagatttacagaaattttcgttacgggagaccgttccattcatgggtatgtgacaagtgttttaaatgattattttgttttcttctctccggtttataagactcttttcatctcgatgcatcatttgaaatggctgacaccctattccgatgagcagacgccgtatacattaaacagttcagagctgccggttgttcccgctaatgtgccccttgtccggaattttgaggagcaattaaaaagatatgtcgggaagctgattattctggatttaggagatataccgaataaagtggggctgttacaggacgtctcagataatattcttgaattgaccaatgcagacggggatactgtcttttggaaattgaatcatttaaaaaccatgcacctgccataaatgataaaactgcctctcttatacagcaggcagttttttttcatagctaaaggtaaatccagctgatccaaacatataaaacggtaatggtaaacacgacggtgagagggacaacgacaatggtcgttttgatatattctgaccaagaaactttttcgccgtgctgtctgatgatatgcatccagatcagtgtggctaatgtcccgatcggcagaagcaatgatccgatatcactgccgataatattagccagataaatgatttttacggttaatgggtcgatggacatttcagttaatgtcaaagtgctgatcattaaggcgggatggttattgaacaaattagagaggacggatgtagcaatgcccataatagatgcagcgtgggcaatgctttgtgagacataaggctcaatagactgaacaagcaatgccgtcagtccgatattatgcagtccgtaaatgataatgtacatcgtgaaggcaaaaataaagatatgccaaggcgctttccttaataagtccgccggtccgatttttaaataaaaccatctccagcaaagcaggatgactgaactgatgacagccacgagcgaaacggatatgccgttgtaagaagctgcaaacagactgatccggacaaacaatacaaataccaaaacacaaaacatgatgttcgtacggctgtttttttgggacaagtctggcggaggctgaagcggatgatatcgtttgtgttccagcgattcaaaatgaaccggaatatcggggagctgtttcggcaaacggcggtagaaaacggcaaacagcagaaaggccataaacaccagtcccagcgtgccggggataaacatcatattggtgtacaaataaaggtccatgcctatcattttgagagaaattaaattgacgatattactgacgccgatcggggtgcttgccgccgtcgcaattaatacgccgcttattaaatacggtgttttctgatgtcttttaagtccgagatattgtaagaccaatagtaaaataggagtggtgattaagacgctgccgtcattattcagaaagagcgtcattgaaaaacagagcaggttggtcagccaaaaaagccggatgcctgatcccttggcgcggtgaagcagtttggccgccgcccagttaaaaaaaccgaagctttccagcgcgatcgccattatcattgtggagataatggttattgatgctccggtgacttttgaccctatatcccccaaatcatgaaaggaaacggttccgcataacaaaacgagaatggcgcccagcgacgccggaacggcttcatttaatcccccgggtctccaaaatataaaaataatggtcacaaagaaagaaatcagggtcaaaatgacggtaatatgtgtaatgtgttctgcctccttttcgatgggtcattgccgccccgttatttttatccctcctgatcagttgtactgtatgtatacgggtacaggtcgtaaggtgtactgagcgtttctaccaatttagtaaaaatccataaaagcacaaaaaaaagaggctgctttcggcggccctcttttttatgcattttccttatccgcctgcaataaagcctggcgcttattcataatatccagaaaatgtttcaggatcggattttgattatccttgcggtaggcaatgacccattcggcagtgagctgcgcctgattaatgccgcggtaggcgacttcgagattaaacagctttttagcagaagaaggcacgaaggttacaccgataccggcactaaccaatccgatcaccatttgatactccgtcgcttcctgaacgattttcggtttgaagcccgcctgctcgcagtagtttacaaactccaggtataaagtcggccatgtttctttcgacagtgtgataatcggttcattttttaaatcctgaatgtcgattgtctgtttagcggtaagcgggtgctgcttcggcaaagccagaatgcacgggctgctctgcaccttttccatatgtaacgcggaatgttgtaaaggcggatgaaggatgccgatatcaatgttccccttcagaagttcttcctgctgtctgaaagaagaaatttcacgcagatcaagcttgacggaggggaatttttcgcggaattcccgaatgatcggcggcagaaattcatatgtggccgagccgacaaaaccgacgacaaggcggccgagctctccccgcgccgttctctgcgccatttcaatcgctttgtctatttcttcgatcgcgtttctgctgtgttttaaaaaactttctccggcagctgaaagctctacaacccgtttcgtgcgctttaataaggtcacgccgacttccttctcaagctgtttgatctgctggctgagaggcggctgtgtcatatttaaccgaagcgcagctttgccgaaatgaagttcttcggcaacggcaataaagtattgaagatggcgaagctccatccttatccattcctttctctttgttaattattcgtgaaacatattaatcatacggcgaattgatattggaggtcaatttccaaagagtgtatagtgaataatatcacaaattacttaaaattttatatttaatatgcataataaggagtgagggtgttggcaaaagcaacaaatgaactaaaaacctctgaaaaaaatcggggggcggagcttgttgttgattgcttagtggagcaaggtgtcacacatgtttttggcattccgggtgcaaaaattgatgcagtatttgatgcgttaaaagataaaggacctgaactggttttatgccgtcacgaacagaacgctgcatttatggctgcggctgtcggaagactgactggaaaaccaggcgtttgtctcgttacttcaggcccgggggcatccaacttggcgaccggcttgttaacggctaatacagaaggtgatccggtagtggcgctggcgggtaacgtaattcgcgcagaccggttaaaacggacacaccaatcattggacaatgcggcgctatttcagccgattacaaaatacagtgtagaagtacaggaaacagggaatataccagaagcggtaacaaacgccttcagggcagcgtcagcaggtcaggcaggcgcggcttttgtgagctttccgcaggatgttgtgaatgaaatcacaaatgtgaaaaacgtacgcagcgtgccggcgccgaaacaaggccctgcaccggaagaggcggtcagcgcggctatcgcgaaaatccagacggcgaaacttcccgttctgttagtcggtatgaaaggcggaagaccggaagcggtaaaacaaatccgcaaactgcttgccaaaacaaaactgcctttcgtagaaacgtaccaaggggccggcacattgtccagagagctggaagaccaatatttcggccggatcggactgttccgcaaccagccgggcgatcttctgcttgaacaggcggatgtcgtattaacgatcggttatgatccgattgaatacgatccgaagttctggaacgtaaacggtgaccgtgctattatccatcttgacgaaatccaggccgatatcgatcatgcctatcagccggaattagaattattaggcgatatccccgctacggttaaacaaattgaacacgacgctgtgacatttgatatgggcagccgtgaaaaagaagtgctgagcgagttaaaacagatgctcacagacagcgagaaggcgccaagcgatcataaatccgacagagtgcatcctctgcaaatcgtccaagaactgcgcaatgcaattgatgacgacgtaaccgtcacttgcgatatcggttctcacgcgatctggatgtcccgctacttccgcgcttatgagccgctgaaactgttgatcagcaacggcatgcagacattgggcgtagcgcttccttgggcgattgccgccacattggtgaatccgggtgaaaaagtcgtatccgtttcaggagacggaggattcctgttctctgcaatggaattggaaacggcagtccgcttaaaagcgccgatcgttcaccttgtatggaatgacagcacatatgatatggtcgcattccagcaaatgaaaaaatataaccgtacatcatgcgtagatttcggaaacattgacatcgtaaaatatgcagaaagcttcggcgccaccggcttgcgcgttgagtcaccggaacagctggcagacgtgctgcaaaaaggcttgaacacagaaggccctgtcatcattgacattcctgtcgattacagtgacaatgtccatttatcaagcgacatgcttccgaagcaattcaaagaaaaaatgaaagcaaaagctctctagcactctgcgcaccatgacctgttttctaaaacagcccaatttaaaaggagtgaagggaatatgaaaaacgcaagcgacatccatatgatgagccgcggagaaaaaggctcacctgaggatcaaatctatcaagtatccaccatgacatctctgctggacggagtgtatgacggagattttgatatggctgacattccgaagttcggtgatttcgggatcggcacgttcaataaactggacggcgaattaatcggatttgacggcgaattttaccgtctgcgcggcgacggaacggctacgcctgttaaaggcggagacctgtcaccattctgctcattcacatttttcacgccggacatgacgcatacgatcgacggcgaaatgacccgtgaagaattcgagcaggaaatcgccagccttctgcctagtaaaaacttattttatgcgatccgtttagacggcgtatttaaaaaggtgcagacaagaacggtagaacgccaggagaaaccgtacgttccgatgattgaagcggtgaaaacacagcctgtgttcaactttgacgacattcagggtacaatcgccggcttctggacgccgggttacgcaaacggcatcgctgtttccggatatcacctgcacttcattgatgaaggacgcaattccgggggacacgtgtttgactatgtcattaaagattgtaaagtgaccatttctcaaaaaatgaatatgaacctcaagcttccgaatacggcggactttttcaacgcaaatttagataatccgaattttgcgaaggatattgaaacaaccgaaggaagcccggaataaaataaaaaagaaagcctcatttttctcgggggctttctttttatttggctgaaccggcaaagattaggtaaaatacagtcaaaagggaaaggtgtggtagctgtgaaagtattggtattagcggttcatcctgacatggacaactcagcggtcaataaggcgtggacagaagaattaaaaaatcatgatgacatcacggttcgtgagctttataaagaatatccggacgggaaaatagatggggaaaaggaacggcagctgtgtgaacagtatgaccggatcgtatttcaattcccgctgtactggtacagtgcgcctccgcttttaaaaacatggatggatcatgtgctggcgtatggctgggcttacggttccaaaggaaaggcgctgcacggcaaagaattgctgctggctgtttctgtaggtgccggagaggatgcatatcaggcaggcgggtccaaccatttttcactgagcgagctcttaaggccgtttcaggcaatggctaattttacgggaatgacctatttgccggctttcgcgatgtacggggttagcagcgccgatgctgcggctatccgtgacaacgccaaacgcctggcggattacataaagaagccattttagagtcgtatgcattcatcttcatccgacaatatttcctgagaaatatttcgaaccttagacgtttctgactgctcaagaaagaaaaaacggatttcgcgctgaatttgcgaaatccgttttgatattatgtcagtttttgcagatcttttgtgctgatatatcccgttgcgcccccgtaatcgacaagcgcccagccgaaatcaatgccgccgccggctgtctttttccatccgaggaaagaaacgctcgtgtttttggcaagggaagctgtgaccgcttgtttgtctgtatatacttttgtttttgccgtcgtttttacggttgttgcttctttaacaatataatgagtagatacaaatcctgtttttccgtttttataatgtacttttgcccagtcagcgttctggaatgaaacgatctttaagctgtcgcctaaatgaagggtatcagctctcggactggctgctgatgcttttgttctcacgttcaatgcttccgcggaaacgagataagagtcaagcgggtagctgtacagatcgtcaattttgaccgcttcttgcgcgtgtgtctcgggaagaggcgttattccggcagctgaagccgctgatattcccgctgcaagggtcagaatggatgccgctttggctgttttcttcatctgtatctctccttttacttcatcctttcacgttttaccggaagtctaaacatcagccggttatttttgcgtttgaagtttcaatggagcggaaatggtttttttgactttttttcctttgagcacctgctccgccgcttcggccgccagttttccgatcagctccggctgctgggcgaccgtggctgtcagcttcccgcttttaatggaagaaatcgcatctttatttccgtcgaaaccgacgaccaaaatgtgtttgcccgagctgttaatcgcttcgagcgccccgagtgccatttcatcattatgggcgaacacggctttgatatccgggtgtccctgcagcaggttttccatgacggtcaatccttttgtgcggtcaaaatctgccgcttgctttgttacgacatccagctttttgtcggcaatatgatgaaagcccgttccgcgttcccgtgtcgcggatgcgcccggcaccccttgcaattcagccactttggcgccttttccgagctgatcggcgaggtagtcagccgccatttctcctcctttgacattgtcagaggcgacaagcgtttcgactttgccgtgttcggctgaacgatccagcgcaatgacgggaatgccgagggaatttgccgattcgactgctgttgaaatcgctgatgaatcggtcggattgatcagcagcgcatcgactccctgctggatcaaatcttctacgtcatttgactgtttagatgaatcattttgggcatcgacaataatgaccttcatgccccgttttttggcttcctttacaacgccttcttttaatgaaacgaagaacggattgtttaatgtggagacggagagcccgatagtgaattcttttttatgttttgtgtttgacggttttgcccattgcggcggttcaagtgaacaggcggacagcaaaaacagtgataatgccgcgatcgtgatgatggctttcttcataatggtcctcctactatgccgattttttgcggtccagcagcaccgcgattaaaatgacgattcctttgacgacgagctgataaaacgatgatacgccgagaaggttcaagccgttgttcagcgtaccgataatcaaaaccccgatcagcgtaccgatgatgcgccctcgaccgccggacaggctcgttccgccgagaacgaccgctgcgatggcgtccagctcgtatgattctccggccgtcggctgtgcggaatttaagcgtgatgtcagaatcgctcccgccagcgccgataataaacctgtcagagaatagatcatgatcttgatgcggggcactttgattcccgatatcagcgccgctttctcattgccgccgatggcgtatgtccggcggccgaacggtgttttgtgcagaagaacccacagggccgcaaatgcaatcagcatcgtaatggcaggtacggggatgccgagaaaataaccgcgcccgaataattgaaatgcgtaatttgaaccgagccccgtaatcggatttccgtccgtatagacgagggtcagtccgcgaaagacggtcattgtcgccaaagtggcgatgaacggcgccatttttccttttgtgattaataatccgtttatcatgccgagtacggcgccgatcacgcagccgatgatgacggctaagatcgggtcgatgcctgagaccatcatacctgcgaccactgcgctcgataaggcgaggatggctccgacagagagatcaatgcctcccgttaaaatgacaaacgtcattccgaatgcaatcagagcgttaatcgcaacctgccgaagaagattgagaatattgagaggttcaagaaaactcgggtttaaaacggaaacgatcagcacaagaatcagtaagccgagaaacggaccgagtttttgcgtgaaggtatgaatggaaaatcgcttttgttcagttgatgttattggttcagttttcatactgctgccctcccgtggcaagtgtcatgatgtgttcttgtgttgcatctgccgcattgatttctccgctgatgcgcccttcgtggacgacgatgattctgtcactcatgccgagaatttccggcagctcggaagacaccatgatgatggcgactccgcgatcggtcagttcattcattaatgaatagatttcccttttcgcgcctacgtcgacgcctcttgtcggttcatcaaggatgaggactttcgggccgattccgatccatttggcgatgacgactttttgctgatttcctcctgataaatgccgggcggcggtttccggagatgcagtcttaatggtcagacgcttgatgagcagctcaacgaactccgcctcgcgttttcggtcaatgatgcctttcggagagaagctggtcaggttcggcaatgagatattttcacgaatggacgtatccagcagcagcccttcatctttgcggttctccgtaatcaggccgagtcccttgcggatggcatcgtacggaccccgaatgccggtttttcggccggaaatccagacctctccggaatcgagccggtcaattccgaacagcgccctcatgatttctgtccgtccggcacccattaagccggaaacgccgaggatttctccggcgctcacatggaaactgatctgtgaaaatcttcctttttttgaggcgtttttcacttcgagcaccttatcgccgagtgacggcgtgcgggtcggataccgatcggtcagctcccgcccgaccatttttttgaccacttcatcaaaatgagtatctttcatatgcgccgtatcgacagtgaggccgtcccgcataatggtgatccggtcgcaaattgaaaatatctcttccattcggtgagaaatatagacaatggatacgccgtcccgctttaacgccgtcatcacgtcaaacagtttgctgatttcccgttcggtcagcgccgcggtcggttcgtccataataatgacttcggcgtttgtcatcagcgctttggcaatctcaatcatttgctgctggccgacggaacattgtccggcttcccggtcaagaggaagagagactcccagtttttcaagctgtgattttgctagcgctttcattttcttcgtttccaaaacgccgaacgccgtcgtcagctctttgccgataaaaagattttcaagcaccgtcatgtccggccatatattcagttcctgatggataaaggcgattccgtgcttttcggcttcctttggattggagaaattcatatttgttccgtttatcgtaatgtttcccttgtcgagccggtagagcccggtgagcagattcattaacgtcgatttgcccgctccgttttctcccattaaagcgtggatttctcccggcagaagctcaaatgagacgccggatagcacttggtttttgccgaatgctttatgaatgtctgtcatgccgatgtgcatgctggatcccttctttctagaaaatcacacccgcctgcaggatgcagttggcgtatggtgtcatttcacccgtccggatgacggcttttgctttctgtgtgagccgtttgaattccgagtgggacatgtactcgatcgtctgcgctgagaaatggctttctatgaaacttgcattctcaggattttcgtctttgatctcggaggcggccatcaccttttcgacggccatctccccggctaccaggctggtcacatcccgaaaggcgggaatgcccgccgttaaggacaaatcaattttagggacgccgtcagggacggggagacccgcatcggcgatcgcgatgaggtctgtatgcccgagatcggctaatactttggcaatgtggctgtttaacattccgtgttttttcatgacagcagctcctcaacttcttttctgaccggcatcccgccttgggcgccgaagtgctgcacggacagggaggcggcgcggttggcgaacaggagcgcttgctcgatgtcccgtccttccgcgagcgcgacggcaagtgccgcattaaaggtatcgccggcacccgtcgtgtcgaccgcttctgcagggaagccgggaacaagccgttccgcggtgccgtctgagtagcgtacgccttgttttccttcggtaatgaacagtttgccgggatagccggcgagcgcttcttctttcgtccggtcaggaaataaaatggatgcttcatgttcgttcggcgtaagatatgcggcattctcaatcgtcgattgtttcagcgggcgggccggcgcgggattcaggataaccggaatttggtgcgcgcggcagtagctgcacacttcttcaacagtttcttcaggaatctcctgctggatcagcacgatatcaatgccgggaagtttttccagcgcacttttggcataatcgggtgagatgtcatcgtttgcgccttttacgacgacgatgctgttgtctccttctgcgagcacaatatgagccgttccgctttttttatgtgtaaccgtttccatatagtccgtattgacaccgtttgccttcaggttttcaataatcgcttttccgtagctgtcactgccagcttttcctaccatatatacgtttgcgcccagacgggaagcggctacggcctggtttgcgccttttcccccgggcacggtttgaaagtctgtgcccagtacggtttctccggctttcggacgccgttcggatgtgacgaccagatccatagaacagcttccgataacacaaatttcactcatggtgatcatcctttctcgtcgtttgtcttcttatataagtcacgggcagttgaatggccgtctctttcggcggctctttctttatcaattgcagcagcaggtttgccgcttgttttcccatctcatatgcaggctggcggatggttgaaagcggcggaaacaaaagcctgctctgcggaatatcgtcgtatccgatgatctgaatctcctccggaacttttttgccgagccgcagcgcctcatggaggacggcagccgccgcaatatcgttgctggcaatgactccgtcggtttcggggtatgctgcaaacaatttttctgctaaaacggcggcatccttgatagaaaatgaagcggcggagatgacattgaactgcgcgcccgctttatacagcacatcaagtgcgccgttaaaacgttcctgagcggtcggaaggtggcctgggcctttgacaagcgtgatgcttgtgcttttgccgcgaagcatttcctcagccgcccgttttccgcctgcccgcccgtcactgaatacggatggggcgccttcttttgtccggtccagaaatacgaccgggtaaaggctgccgctgtattcgggaaggtcggggtaatgggtggccgccaaaataccggcaacttgattttgtttaaatgtttgcaggtagtcgagttctttttccaattcttcatcgctgttgccgatgatcagccggtatccttcccgctgcagctcgtcttcagcgccgcgggcaagctgcgggaaaaaggggttcgtaatatccggaagcaaaagcccgaccagtctggattctcttttataaagagagcgggcaacttcattcggataataattcagcttctccatggcaagcatgaccttcgttcgtgtatcttcatggacgtagccgttgtcattgaggacacgcgagaccgtggcaacagagacgccggcagcgcctgcgacatctttaatcgttaccaacaaacactcccccttcatttatgtaaccgtttacacaaaaagagtaccacgaatcatttcggttggcaacaaaaaaagagaccggggtctcttttagttcacgatgccgatttgcgagatattcactttgatatcagggattatctcgatggaaggatagacctcacgccaattgagccgcttgccccgctcataataatgggtttgatatttccggccgatgccgaggatatccgagttgtgctcctgaatatggctgatcaccgatctggcctggctgttcaaatttgctgatgcttgtttgttcatttggtcgattgccgtataagaattcagtttgtccttcggatattccaagacgcgtgcattcagctttaaacggattttcacttttatatgctgcggatctgtatctataaatacaatctttcgcgtggcatccgtgatgccgagagaaagataattttcaatatccattttgtatttgtcccacagcttcagattaatattagccgatttattaaattgcccgcttaaaagggtcaggagggtcgaatcctgaccgagcacctcagtcactttccgctgtccgctgaacagggcagaaccctctacctttatcgtctgtccgttaatcgataaataaggaagggcgaaatccttatcagccgtcagcatgcttgaacggatggattgcaaattttccatgctgatatttgattccgcattagcgcttgttaataaattcgttaaatacttgctgacgatcaatttctgccggacgatcagcttcagcacttcaatcgcctcgccgtcttttacaaccgccggatgagcgagaagcggacttttcggatctctgtaaaagacatcgagataaggaaaaagcggtttttccgccattttctcaccgattaataagactctttgcttggacgtgtcaatgcgctggtcgacaagcttatccaattgaaaccgcgcttcacggatggtgtgtccggaagcgctgagcaccgtcgtaatgaatgagccgcccgtttcctgttccgcctgggaggactgaaccttccgataggtaatgccgattttatttttaccgtcatgatcaacatcaaggcttgcggtcagcacgagagaaatatctttcaacaaattttgatcccagcagccggcaagtgtcaggcttgcgcacatgagactgataagaaccgcttttttaatgcgcatggcggacaccctttttgcgtacaaggacaatcaataccataaacaacggaaacaaatacacaaacacaatatcggaaatgcggaaaaactgatccagctgctgtatcgttttatctgtgcttgtggcccaaatagacagaaggaagacgagcagggccagcggataaacaaaccggctgtgatctttttgattgaacagcttggcgatgccggtgcttgccaagtaaaacacgttggccagcgttgaaaagacggtcacgaaccaaaacgtcaaaaagagcagatccgtccgttcgataattctgaatgaaacggtttttaacaggtacagcacaggctccgggatcatttttatttcttcggggctgatggtgacaaagcaagtaagagtgatatacaggtaataaaggataatcaagccgtttgaaatcgtcagtattttgtagcgctggctgacggtgcagttgataaggggcccgatcacaagcgccgcctgaaagccggtaatgctgacaagtgtttgctgcaccccggtaagcatgtcttttgcggttccgtgaaaaatcggcataatgtatgtgatatcggcttttcccagtgtgtataaaagcggcagagagatcagcagcaaaaacggcgttaaaataaagctgaacctcgcgatcgcattcagcggggcttgggcgatatagacagaaccgaggatcagcattaagctgatcacccaattcggagtctgagggagcacccagatatccaataaccgtgtaaatacagaaagaatgagcgtgcagagaaacgcgaaatataaaatatacagcacctgcacccctttgccggcaagtgttccgaacacctcctccagcatttcatacaggttcagcttcggaaaccggtgaaataatatcatatacaggctgaaggtaagctggacgagcaatccggtaagcagaatggaaatccatccgctgcttcccgatttcatcatcagtaaatggggcagcgccaaaatgccgatgctgatctgcgtctgattaatgaaaaacacgccttgaagccggctgatttttttaggcttcatcttttctccacccccgaacatgttttatctgctttgaatcttgcggtctcaaataaaaaggccttcttttaataaaccaggccggcagccggataaatgcatcctttaagtcactgaaatgaaacggcgtcagagatgataaatacggaacgccgagggattcaagcttgcacaggttcatcagaataagtccgaagccgaatgcgatgccgataaaaccgaacgaggatgccagaaacataagcggaaatctgagcgttcgaatggacgtgctcatttcatatgaaggaagcacaaaagaagaaacggccgtaacggccacgacgataatcatcatattagaaatgagtcccgcctgaacgactgcgtcaccgatcacgagaccgccgacaatgccgatcgtctgactgatcggtttcggcagcctgataccggcttcgcggatcagctcaatcgtaatctccataatcatggcctctatcagcggagggaagggaatatcaacaatcgaatttttcatggtgataatcaaatcgttgggaatgacttcaaaatgaaacgcaatcagcgcgatataaaaagcgggcagtgtaatcgcgatcataaaggcgaaaaatctcagcactctcaaaaaactggcggaaatccacctcgtgctgtagtcatccggcgattgaaaaaaggaaaagaacgtgatcggcgcaatcaaggccgacgggctgccatccatcatgatcagcacacagccttccatcacgcatgcttttgctttatccggccgttccgtatgaacgatctgcggaaaaatggaaaacgaattatcttctatcgactcctcgataattccgggcgcaagcacgctgtctatacgcaggtatgacaggcgccgcttcacttcctccacaatctccggattggcgatattctcaacaaagataaccgcaacctttgatttggctctttccccgatatccatataatgaacggagagatggcggtcctgtatgtgaaaccgcagctgatgaatgttcgtttccaaactttccacaaacccgtcatgggcgccgcggacgatactttcagattcgggttccataatggaacgcagcggattctgcccgacggaaaacagcttcgctttccttgatgcatcgctgagaaaaacaacctggcctgccaaaatcccgtcaatgagttttctggtttcatccgtttccgcactgctgacggcattcatcgtttcctcaagcggaccgttctgcagggtgtcgcttaacagaaactcattcagcttctgttcttctatcatttgttcaatataaaagaaagcggtatgacggtcctgcagtttgatccttcgtattttaaaatcaccgcaaacacacatcagctcctgcatttcccgtacagccgattcaaaatcgccggaaatccgcttgttttgtttatccgcagacatcagaccgcctcctttcccggttatttgtagttttcagcgggtattccttttttatgcattttataaaatagaggagtttctcgacgttttaccaagaacttcacaattatggatgaatatttcttgaacgaatataaagatttattaaaattatttcaaaagagtgataaatgtcctgtaaatgctttaaaaggagataggctttccgcatataaaatgtgtatttcttgtaaacactccggacccgtctttttctgtcacgtaccagtcattccgctagttattttggaatgggactgaaagcaggatacgggggaaaaatgaatgactttaagaccttatccttaacaaaacaggcagtctgcacacagcggacatagagtcccgaaacgtatgcgcagtgcggaaaacgctgatataacaggctgtaaaagatggattatcattacatctttttcttccggaacgcgtatagtcccattggtccaaatgaatttatgtgcggaaatgtaaacgcatacatttttcttttaaaaaattgaagtaaggtttaagtcctgcctattcccaaaaaaagcaattcgataataggaagaatagcgtcactaatagagaagtttggctcagtgaaagcgggaagattatgttacataatgccgattgagaattcatagtgaagctatatactgatgaatgaatttatcaatacagaaggagatgtcaaaaatcaatgtggttactcattatagcctgtgctgccgtactaatcatcggaatcattgaaaaaaggcggcatcagaagaatatcgatgctctgccagtacgcgtcaatattaatggtatccgcggaaagtcaaccgtaacgaggctgacgaccggaatactgatggaggcgggctacaaaacagtcggaaaaacgacgggaacagatgcaaggatgatctattgggatacacctgaggagaaaccgatcaaacggaaaccgcagggcccgaatatcggcgagcaaaaagaagtaatgaaggaaaccgtagaacggggcgccaatgccattgtcagtgaatgtatggcagtaaacccggattatcagattatctttcaggaagaactccttcaagccaacatcggcgtcatcgtgaatgtgcttgaagaccatatggatgtcatggggccgacgcttgatgagattgctgaagcttttaccgcgacgataccgtataacggtcaccttgtcattacagacagtgaatacacagacttctttaaagaaaaagccgcagagcggaataccgaggtcattattgcggataactctaaaattacagatgaataccttcgaaaatttgaatatatggtctttcctgataacgcttccctggcgctcggcgttgcccaggctcttgggatagatgaagaaacggcgtttaaaggaatgctgaacgcgccgcctgatcctggcgccatgagaatcctgccgctgctcagcacgaaggagcccggtcatttcgtaaacggctttgccgcaaatgatgcatcttctactttaaatatatggaaacgtgtaaaggaaatcggctacccgacagatgaaccgatcgtcatcatgaactgccgcgccgaccgtgtggacagaacgattcagttcgcaaacgacgtgcttccgtacattaaaacgaaggaactcatactcatcggcgagacgacagaaccgatcgtcagagcttatgaagaaggcaagattcctgccgatacactgcacgatctggaatataaatcaacagacgaaatcatggacgtgctgaaaacaagaatgcaaaaccgtgtcatatatggcgtcggcaatatccacggttcagcggaaccattaattgaaaaaatccaagagtataaggtgaaacagctcgttagctaggaggaaaaggataaatgttcggatcagatttatacatttcacttattttaggcgtgttaatcagtttaattttcgcggaaaaaacaggtatcgtacctgccggtttagttgtgccgggttatttagggctcgtttttaaccagccggtctttattttactcgtactgctggtgagtcttcttacatacgtgatcgtcaaatacggtttatccagatttatgatattgtacggacgcagaaaattcgcagctatgctgataacgggaatctgcttaaaaatcgcccttgattttctttacccgatcgtaccgtttgagatatcagaattccgcggaatcggtatcatcgtaccgggtctgatcgccaataccattcagaaacagggattaacgattactttcgccagcacgctgttcttaagcggcgcaacttttgccattatgtttgcttactacttaatctaatgtaaggtgtgtcaaacgatgaaaaaacaattaagctttcaagaaaaactgctgaagctgaccaaacagcagaaaaagaagaccaatcttcacgtttttatcgcgctgccaatcgtcttttgcctgatgttcgtctgcatcctgacagggaaggcggaaacgccgagtgtgaaaagaaatgccgatgaccttgtatcagcctcatttgtcggagatattatgatgggccggaatgtcgagaaagtgacaaagcataaaggcacggagagtgtcttccgttatgcaaagccattcttcgaatcatccgactatgtgtcagggaactttgaaaacccggttacatataaaaagaactacaaagaagcagaaaaaaatatccaccttcagtcaaacaaagatgccgtaaaagtattgaaggacatgaatttcacagttctcacggcagccaacaaccatgcgatggattacggccctcaaggaatgcgggatacggttgaagagttttcaaagcaaaatcttgaacttgtcggagcaggcctcacgctgaaggaagccgagcagaacatttcttatcaagatgtaaacggaatcaaaatcgcaacactgggtttcactgatgtttccggaaaaggttttgcagctaaacgaaatgcgccgggtgtgcttccggccgatccagagctgtttattccgatgatttctaaagccaaaaagaaagccgatcttgtcattgttcaaacacactggggacaggaatacgataatgatccgaatgacagacagcgccaattggcaagagcaatgtccgatgccggagcggatattatcgtgggacaccatccgcacgtgctggaaccgatcgaaatgtaccacggcaccgttattttctacagcctgggcaacttcgtattcgaccaggggtggacaagaacgagagacacggcgcttgttcaatatcatctccagaaaaacggcacgggacgctttgaagtcacgccgatgaacattcatgaagcaacgcctgcaccggttaaaaaaggcagcatcaatcataaaacgatcgtacgtgaactgacgaaagaatcgaatttcaagtggagcgtcaaggatggaaaattaacgtttgatgtggatcacagcgatatcttaaaaaagaaagcggagtgaaaaacaaatgaaaatcattaaagcgggatggccgtttgccgcgatcattatggtatttatgtttatgtctgcgtttaaatacaatgatcagctcacagatcaggaaaaacaaaaaattgacacggaaatgcaaaaaattcagcaagaggacacagcgggcgcaaaataagcgcatgattccgcttgccggcatattgtttgttccgaatccagtaaagaatgcccatatcgggcattctttttttgtgtgctctcctaaacatttgttaaaagttaccgatgtaaaaactactaaaaatgaggagagtgaatagaaaacatgctcacaagctggaggaagtacatccttgccggccttatgatttgtcttgtggcacctgcagtaacgagaacggaaattgccgaagcggattctcaagtttctgtcctgatcgtttcagacgcgcaaaaacttgtcggaaataaatatgtttacggaggcgaagagcctgaggacggttttgacccgtccggattgatgcattatcttttcagcaggcagaacatccatctgccgagaacggtcagtgatcaatggaaagtcggagccgccgtcaaagaaaatgaccttttaccgggagatcttgtgtttttcaaaaagtcagattcaacacaaaacgcggccgtccatgacggtctgtatatcggaaacggagagatgatacacagttctccgtcagaaggcgtaaccgtcacacgctttcaaaaaagcagttattggatgaatttatatcttggcgcaaagcggatgacaaaagatccggaactggctgatgatccgatcgttcaggaggcagcccgttacctcgacattccgtatgtattcggcggaagcacgcctgaggcgggattcgactgttcggggctggtccaatatgtttttgaaaacaagcttcacatttacctgccgagatctgcggaacagcagtggctggtcggtgagaaaatcaaactgagcgacataaagcccggggacgtgatttatttcagcgatacgtataaaaaaggaatttcccatgcgggcatttatgcgggagagggaaggttcatccaagcaagccgctccgaaaaagtcaccatttcttacttggcggaagattattggaaaaaacatttcacaggggtgcgccgattcagcaatttagccatttctaaagacaatcccgttgtgtccacagcggccgatcatatcggaatttcttatctgaaaggcggcgcttcaccggaaaccggctttgatacggcgggatttgttcaatacatctatcaaaaagcgaaaggaatcagcctgccgcgttatgccgacaagcagatgcaggcgggcgttccggtcgataaacaagatctgaagcccggcgatctggtcttctttaaagcggaaagcctgaatccggccatttatatcgggaacggacaagtgattcatgtcaccgtgtccgcaggtgttaccataacaaatatgaacacaagcgcttattggaaggacaaatatgcgggcggcatccggcttccgtaaaaaaagacgtcagagagtgtctctgacgtctttttcttttaccgtttcggcgctctgtatccggccgctatcgcatcctctacagaacagaacatttccgcgggatctgtcgtccggtcgtagtacgtacttcccggcgtgtgataaatgccgtaccggctgcctttaatgtcgcatccctgtgaggtgccggctgctttcgtttcggcatgtcctccggaggaaggggcgttgttttgcgccgtttccgcgttttcggatgtttttgtttctgctttctgccgctttaaagttttattttctgactgaagcgtttcagcggtcttttcgagcttcttttgtgaattttttaatttctcattgtcttgtttgagtgatttgtttgtttttttcagctcgcttatctcttggctgagtttgctgagtttttcttcattgccggcttcagcttcggatttctccttttcggctgcggcactgatgctttcatattttttctcaagcgcctggtgttccttcgtcaatttttgataagccgtatcaagggtgctgtatttctcctctgccttcacggccgaggcgtccggctctgcgagggatgcaccggtcagaagcaggataaatccgccgatgagaagaggccaaaacagcttttttgaaaaatgtttttctttttttgccgctttgcatatgagatgaaaaattccgtatccgactgcgcagagaaaagctaaaaatcctataatagcgattgcattcgacatcatgaaactccttttttagaaaacatgaaaaagccaggccgtgaaagacctgacttttaccttttattgcccattgtcgagaagccggttgatgaaatatgcgacgccgttttcatcgttgctttttgtaatataggtgcttttttctttcagttcatcaatcgcattgcccatagcgatgcggtttcccgccgcttcaaacatggagaaatcattcgggctgtcgccgatggcgtaaatatcctgtttttcaattccgtacagtgaggcaagctccgtcagagcacgtccctttccggaaccggcagggaggatttcgataatgtgttttccggaagatgtctgggataatttccgatgatgtgtaatttcttctttggcgtttctcagtttttccatatcaaaagagaaacaaagaagcttgtaaacatgttcgtctccgttaaaaatcgcctgtatatcctgtacgggtttaatgccgaattgtttgaactgcgtctttgcgccctcccataatgtctgaatatcttccttaggattggcgcttttcagaatgtccagttctgcctgcagtttggactcgccgtcaaacggggacagcagatgatcatctgtatagacctcaaagtaaatgtctttgtccgttaaataagcggcgatatccttcccggcctgctgatccattaagagccggctgacgaggcggtatcctttgtcatggactgtcccgccgtttgccgcaatgatcggaatatccaaatccttcaagagcgcttttacatcaaacgtggctctgcccgtgcagatggccacgagaatgcccgcttcatccgctctttgtaaagccgctctgttttccggagaaatcacactgtccgaattcagtaatgtgccgtctaagtcaatggctatcaatttcatatgtatggatgccctccttaaaaataaagctgcttcatgtagtatgttcagctttgtgcgaaatcagcagaaagccgtcagttaaaaggctataccttcatgtcctttttttcaacagaaaaacggcgggatttgctaatcccgccgtgacatcttacgcgtctaaatcattttttaatttcgtttttacttcttgaaggttttcctcattcagcttgaagtaataaatatttttgccgtactgaggagtgtaaatgtagctgtctgaacctgtcagctgcaaagaattcaccgatttcagcgatgtgataaacgggaacagaccgatggcgtcattaagagataagttcatttttaagtttttccctaagctgtcgacgatatcgtcataagatgggatcgagcttaacgatttagattttttaataatggcgctcagcacttccatctgtctttgtccgcgcatcagatcggtgtccgctttgcgtgttcttacataagccagtgcctgctcaccgtcaagcgtctggacgcccggcttcagcacgacttttccttttgtatcgactttaatacgatcggcaattttctggcttttcacatttaccgtaacgccgttcaactcattgacgacatcgcggaacgcgtcgaagttgctttcaaccacataatctaccggaatatcaaacatgttttctactgttttataagttaaattataaccgccgtaagcatgtgcgtgcgcgaatttgtcatagccgtgtcccgggatgttgacataggaatcccgcggaatgctgagcatcgtcgctgttttctttttccggttgaaggtgacgagcacgttggcgtcacttcttgcgtcatctactgattcacccttattgtcacgggcgtctattcctaaaagcaatacggtgaaagaatccttcttcgggtcaaattctttgatccgttttacggactggtcgccgcggtcaaggctgacgtgcgcttctttggtcgcattattcaatttcacaaatgcgtaggtgccgacggaaccggcgatcaccaataagaaagcggcgaataccagtacaaatttcacccattttctgaggcgtcttttcttttttctgcgttgagatcgttcttccatatcattacctctcgtttctattctttgtgaagcgtaccataattgttgactcggagcaactctgcaaatgagaaaattctaaatctttctctctatttcgacaacatctactgttatttttgcatcaggttcacattatattggacggcaggaagcgggaaatgtttcgtcgctttgtgaaaaataatcagtaaaataatggatattaacggtgcggaaggtttgaaacgatcggaaacaggcaaaagaagcagtagaacaattccgcgcggatacagcgttggatgaagggagtctatataacatgaaaagcatacactcgaataaatggctctattttttcggcgctctcgggggcgcgttatacggatatgataccggagtcatttccggagctattttatttatgaaaaaagaactgggactgaacgcctttacagaaggcctcgtcgtcagttcgttattggcgggggcgattctcggatcgggattcgccggcaaactgaccgaccggttcggcaggcggaaggccatcatgggagcggcgctgctgttttgtataggcggattaggagtcgcttttgccccgaatacagaggtgatggttcttttccggattattctcggactggctgtcggaacatcgacaacgatcgtcccgctctatttatcggagctggctccgaagcataaacggggggcgctttcttcgctgaatcagctgatgattacggtcggaatcctcgtttcttatatcgtgaactatatatttgccgatgcaggcgcttggcgctggatgcttggacttgcggttgtgccgtcagtcattctgctgatcggaatcttatttatgccggaaagcccgcgctggctgtttacgatcggcaaagaagagaaagcaagagaaatcctttcatcattgcggggaacgaagaatattgatgatgagattgatcagatgaaagaagcggaaaaggaaaacgaaggcggcttgaaagaattgtttgagccgtgggtgagacccgcgctgattgccggcctcggacttgcctttttgcagcaattcatcgggacaaatacaattatttattacgcaccgaaaacatttaccagtgtcgggttcggcaattccgcgtctatattgggaacggtcggaatcggcgccgtcaatgtcatcatgacgcttgcggctattaaagtcattgataagatcggccggaagccgctgctgctggccggaaatgcgggaatggtcatcagtctgctcgtattggccgcggtcaatcttttctttgaacattcagcagccgcatcatggacaacggtgatttgtttaggcctgtttatcattgtgtttgcggtcagctgggggcctgccgtgtgggtcatgcttcctgaattattcccgctgcatgtccggggtatcgggacgggtgtctccactttgatgctgcatgccggaacattgattgtctcattaacctatccgatgctaatggaagcagtcggcatcagctatttatttctcatttatgccgctatcggaataatggcattcctgttcgtccggtttaaagtgaccgagacgaaggggaaaagccttgaagaaattgagcaggatctgaaaagccgtaacggaggctcgggatcagaatcaaatcggcggacagttcatccgtaatattcagttttaggggggcggttattcaccggcccctcaaaacggatgcgtgcgggcgcccgcacggtcacataaatgacggggatatgtcatacgttgtataaagtcacgataaaggcggggatgccggtgaaaacgagtattattatccttacatataatgaacttgagctgacgaaaaaatgtctggccagcattgaacgatacaccgacaaagataagattgaactgattatagttgacaacggttcctcagacggaacgagagaatacatatcaaatctgcctgacgtcaaagtcatccttaatgaaaaaaacctcgggttcgccaaggggtgcaaccagggaatcgaagcggcagggggagaaaatctgctgtttctgaacaacgatacgatggtcacgaaaaattggctcacctccatgctgagggtgctgtatcaatctgaaaaaaccggtatggtcgggcccgtcagcaactatgtcagcggcgcgcaaatgatccatgacgcgtatcaatcgcttgatgagctggagtcattcgcggaggcgtattgtgcacgggaaaagcatcaaacaaagcgggtgctgcgccttgtcggcttctgtcttctggtgaaaaaaagcgtcattgaagacatcggcccgtttgatgagcaattcggatacggttcttttgaagatgatgacctatgtctgcgcgccctgcaaaaaggatacagcctgcacatcgctctcgatgcctttgtgcatcaccacgggcatgcgacgtttacggctaatcaggatatcaatatcaatcagttatattcggagaaccgccagcgttttacggaaaaatggggcactgattttacgtactttactcatccgagaccggaaattgcggagctcgttccccgggaggcgaaacggatacttgatgtcggctgcggtgcgggagctacggggctggaacttcaaaacagacagccttgcgaactgtacggaatagaactgcacccgctggcggcgcaagcggcaaaaggacattatgaagcggtgctgcaggaagatgtcgaaaaagtgaagctgccttatccggaaggcttttttgattgcatcattttcgcggacatccttgagcacttaaaagacccgtggcgcgtcattgaaacgtactcatcctatttgtcgcctgccggatcaatcgtttgcagcattccgaatatttcccacgccgaagcgctgttcccgcttctgctcggggactggacatacagagacgccgggattctcgaccgcacccacttgcggttttttacgccgcagacggtgcgcacgctctttccggaagagacatttgacgtgaaaaagcagtcctatacgtatgttcacgtggatgagcgggtgcagctgtttttacaggaaatcacacgaatggcgcaatcgatgcaatttccggtgacacagctgcccgaacaaagccggatttatcagattctccttcgtgtcgaaaaaacacgctgaaggctaccgccccatcgttccgaagttggtaatctgaatggaaacatcatagtcaaaggccgcttcggagaaggtttcatcccagtgatgcttcactttcttccaatagtcgggatattgaatgcggactctgtcagaaaagaagacagggtccgtttcatattgattctgcagcttatcgatgacttctttcatatcgcttttcagttttttttcgaaaaccttttccagcccgtttaaatagtgctgatcgaatgaatcttctccggcatattgatcctctgacaaaagtccttttgttttcaccgctacgtgaaacgacagcttcccgtttttcagcaggggggtgatggaggatgttgattttttgatctcgaaggtaattgggtgccctcctttatccaaagcgggcagcacgccgccctgtatcgtccccgtcagccaattcaggctttgtacttcgtatgatgacagaaagcctgccaatctgttttgttttccgtttttgataatggccgctccgtcatacaccgtttttcctttttgattgctgacggcctgaatgagaaaactgagtttattatggcagtaaatcgaagctctcccgattcggagcggttttaaaatcttcccgttgtagccgccgttgttcgtaaggtcgatcagcttttccgcgggcatgggctgctgctgattcggcgtcggctctgtcagaatatcggccgctttgcctcttgccgcgaagagatagctgctccgccttaattcatcatcacggataaaatggttcatcatctgcagtatattttggtcggccagcaatttgtcgctgaatatcagcacttttaaatgatcgctgtaaacgggcggatcttttaaagcgacttcactgacggcttcaagaatggtatccccccgcgacgtcacattgacaaacacgggccggccggaagcctggctgttttcactttggggcagcaggttttgataggttaatttatatcggcggtcactcgtctcgtctatcgccagcccccgggcgaaagatagcttttcgacttccttcgcatcccagcaccctgaaagcgtcatcagtatgaaaagcgccgccgcccattttacgaaatgtgtcatgacgtctgtttcctcccggctatttttttcatccagctgacaaaccagatgagaaaaggaatcataatgacggcaaaaaacgcatatccgagaatattcgcgaatgcaaacacactgttgatatcatcagggtacattgaaaggccgaatgtcactgccaataagccccccagcagccaggcattgtttttatttttcagtctgaaaatggtgtttaacccgagatgcgctcctttaaaagaaccgagcatacaggtgaactgctggcatgtccacgtaattaaaagaaagatatcaaacctttcgatgaaaataccgcggatttccaaggcgtgaatcagggaaatggtcggatatgtcaccgttttggcttcagcgatcgacatacagccgattacgacaagcagcgtaaagctgtaaaataagcctgcgcatgcgatgccgaagacggcagcctttttcgcctgcttcggatttttcataaacggcaccagataaagaatcacctcaagtcctgaaaaatacagaagggtacgcggaaacagctcaaaaaagcttttgtagcctccttccatgaccgggcggatgaaatccagtttaaacagtctcaggctgaatatgagcagcgtaatcagaatgacgatcgcaatcggaaagagataagcatagagttttgaaatgggatacaccccgccggtcacatggtagatgccgaccgccagaaagatgaatatgacgacacccatcggcgtatttttcagtaaaaagtaattgatgacctcaccgagaaaacgggcttgaaaacagacggtgacgacaaaataacagctgatgaataaattaagaagagaaccgatggcgcgtcccataatgctttgattcagctcataaatggtttccccgctgtttttctgcaaaaatggcataaagagcaggacgatgccgataaacacgagactctgcacaagaataatgatccatccgctcggactgtccgctgctgcggcggagcgcggcagtgttaacacgcccgctccgatcattgttccgcttaccatgagaagtgtctgcataaacgacagcttgtcttccggttttttcatggtgatcacctttgcttgattttatctttcgtctcttttctggtcggccgttttttcaaaagaggcgtcggcagtctgacgatcgtatcttttaagtcctgtcccggctgcgccatgatcggaataagatagtcctggccgaagcttttcaggcgcatcagatggccgacgacaagcagataacacatgatcagtccgtataaacctaatatcgccgacaaaatcatcgaaaaaatacggatgagtctcagcggaaaattgaacgcataggagggcgccgtaaaagaagccaatgccgtaacggatacgataatgaccatcatcgcgctgacgatgttcgcctgaacggcggcctgcccgatcaccacgcccccgatcaggccgatcgtctgtccgatcggcttcggcagcctgagtccggcttctctgatcatctcaatcgtaaaaatcataataaacgcttcaacaaaagggggaaacggaacattcaatctgcttccggcaatcgtcaccgccattctcgtcggcaaaagccccgtgtgaaacgtaacgagcgatatgtaaaggccgggtaaataaatcgtgattaaaatgcatgtataccgaagcagcctgagaaagttaaccggaacccaccgctgattataatcgtcaggtgagtggataaattcatcaatggtagccggcaccaaaagggtaaaaggcgttccgtctacaagaatggagacccttccttccaaaagagcgcccataacccggtcgggccgttcggtcgtcaagacggtcgggaaaatggaatacgtgttatcttcaataagctgctcgatcgttcctgattccggaatgtcatcaatggtgatcgaatccagtcttttcatcacttcttttacaacatcatcaggcgcaatatcccgaatgtaggcaacggcgatccgcttttttgtccgttcgccgagtgtgatctctttgatctggaggttgggatcaccggactgctcgcgcaaaagcgccgtattcgttcggagcttttcgacaaaacctatcctaggtccccgttcaagcacttctgaagccggttcttcaatatcacgcattttaaatgtttccgtttcaaacgaaagggcttcctcccatccctccgccagcaaaaccgatttgccggaaaaaatgtctgcctccgcgtccttaagtgaagaaagccgggtgtgacgatagccgaaagagatggatgacggcggtatttcagccggttcctcttgatgcagggcggccgcctgcacgggcgaaataatatattccgcaagcaattgattgtcggtcagtccgtctatatatataaggcaggcgtcacatttgccgtttccgtacgtaaacgaataaaacatcatgtcatcgctttggccgatccgttttttcagcgcttcaaggtttttgccgagctccgcatgtatcgtcataatgttcccccctttccatcagttattttaatttgcgacaaacaaggcattttattctggaataggaaatgactgagcattccgccccatccgaatggtataatgagcaggtcagccattttatacatattgtttttaaccgcggctccctccgtgttttaaaaaagacacagggggaatgggatatgagccgctttttaaggggaggggaacgaacatgacgcaagagccgatttttctacagcctgtatgtaaagaaaaaatatggggcggcacgttattacgcgaacgattcggatatgacataccttcagaaacaaccggcgaatgctgggcgatatcagcccatccgcacggaatgagcacggtcaaaagcggtccgtatcaagggaaaaccttgatggacctgtgggatcagcatagagagttattcggcggaacggaaggggaccggtttccgctgctgactaaaatactggacgccaaacatcatctgtccgttaaagtccatcctgacgattatgacgccgaggagcatggacagggcgaaacggggaaatctgagtgctggtacattattgactgtaaagaaaatgcggaaatcatatatggtcatacggcccgttcgaaagcggaacttgtcaccatgattaacagcggtgactgggaaggcctgctgcgccgcgtgaagatcaaacccggcgatttttattatgtgccgagcggaaccatccatgccatttgcgccggagcgctcgtgctggaaatacagcagaattcagacgccgcctaccggatatatgattacgggcgtacagatcaaaacggcggtgcgcgtgagctgcatatccgcgatgccgtcaacgccgccaccgttcctcatgtggacggatttttggatgaatcaactgaaacgagaaaaggcatcaccattaaaacctttgtgcagggagaatatttttctgtatacaaatgggatatcagcgggacggcggaaatgacccaggacgctccgtttatgttatgcagcgtcacagaaggaagcggctccatcatctttgaaggcaagtccgccaagcttgaaaaaggcgcgcatttcatactgccggatcagatgcctgactttacgataaacggagattgcacgatcatcgtttctcatatataaaaccaaacttaatcccagctctgggattaagttttttttatttggataattggatgatttctctctgtaaaaatgaagaaagcgggccgataaataaactagtttgatagaaaccaattgaatcagaaagaggagaaggaatgaaaaagagattcgttgcacctatgttattgtccgccgttttccttgtctttagcaccgttacacagcacgccgaggccgcatacagcgactactccgtttacgagctggaaacgaagcagcaatttgcttctgagaacgaggcgcttcaagcggcagcgaaattgaaaaaggatacggggtggcaggctgacgcaaagaaagccggaaatgcgccgctcacttatcaaatctcagcttcaggcttacacgatgaaacggatgcgaaaaccgtgctgaaagattttacgaagcagacgggcgtggccggcacttacagcgcaagcggaagcaaacagccgtacgtgaccgtcacatcaggcgttctatcagacgagcggcagacgaaaaatcttcttgccgaactgacgaaaaaaacgggcgtgaccggcgccgtcaagccggcggggacaaaacagccgtataagcaggtcgtgacttctgagatggcggccgatgcggatgcaaaagcgctctcgcaagcgttgacgaagcagacgggcgtgaaagcgtcataccgtcagatcaaacgggaaacagcccggtttcagatccaatcgggaacaatctccggcgatcaaaaagccgctcaaattcaaactgattttcaaaaggaaacaggattgcagtcgtcgctgaaagtcacggcaaaggccagtccgaatatcaccgtgacagcctctgacattttaaatgcaaataatgcggcaggtttagcgaaacagctgcagcagaaaacaggcgtcaaagggaacgttcaaaagtatgcccaaagcaaaacagcaaccgtgtataacgtgcagtcaggatattttaacggagtaagcgccgtacaaaatgctatcacccaaatcaagaagaatacgggtgtcagcggaagctatcaaaaagccggcaagaagaataattacacggtcgcgatgagcggactgacggctaaacagctgcaaagcgtgcaagctttctttaaaaagaaaaaatggcattgcgacgcatcgcctgtcaaaaagacagcatcagtgtccgtttaccggatcacggcagggcagcttaccgctgcaaaggcggatcaaacggaggcgtttttccgccagcagcatgtaaagacggcaagaacagcggcgggaaaaacagcagaaaacgaatatcagctgctttctcagcagacggcagaccagtcgaagataaaaaaaggattgaatctgctggcgggatataaactgactgccatttcaaaaacgatatccaagcagacggacacaacgtaccaagtcacaaccgaatcactgcttgatacggcaaagatcaatcaatcgctggattttttcaaagggaaaaaagtatccgcctccgcacagaaaacaggtgaagcggcgtatacacaattcagaattgaaacggcaccgctgcttaagaaggaagacattgaccgcgtgactgcttttttcaagcaaaacaaagcggccggcactgtgaaggagacggggaaaaccggctctgcacaatacgtcatcaaaaccgaaaaattcagcagtaaaaccgttttaaataaaagcatgagctttttcagcgccaaacaattacaggccggctatacgagtgaaagccatccggtttatgaactccgcattcgcaatcaattcacgggagcgcagtcagcggacgccgcctcccaaaagctgaaaaagctgtacggatggacgatggctattctgaaaataaaaaacggaccgcaaatcatgaacaccaattacaacatctcgctggcagatatggtcaaaaaacaaatgacagtcagcccgcagactgatgccgcggcttatgcatcgcttacgtacatcaatacggcctccggaacggtcacagccgacgtcctgaacgtccggtcaaccccggaagtcagctcaggcaatattatcgggcagttgaaaaaaggcgataaagtcagcatcacaggccagacaaacggctgggccaaactcagcatgggctggagaaacgccagcagtgacgaagtcgggcagtacgtcaatccggctcacttcgcacaagacagcaagtattactttcaatttctgaagctctctcagacagccggactgaacgcatcggaactgaatcaaaaagtgctggtcaataaaggaatactgacagggaaaggccaggcctttattacagccgccggcaaatacagcattaatgaagtgtatttgatttcgcatgctttgcttgaaacgggcaatggcacgtcagagcttgcgaacggcattatgtataatggtaaaaaggtttacaacatgtacggcatcggggcttatgacagcaacccgaattactacggcgcacaatacgcgtataagcaaggctggtttactccggaagccgcgattatcggcggagcccaatttatcggtgcgtcttatattcacaatccttcatacgagcaggatacgctgtataaaatgagatggtctccagccgcggctcatcagtatgcgacagacatcggctgggcgtataagcaggtaaaccgcatgtacagcttatactcactgctggatgactatacgctttactatgatgttcccgtgtatatgaaagtataaaaaaagggctgaagtgtatgcttcagccctttcttcatgcaaaaaacacccgcctcagattcaggcaggtgcttcagcacaatttttcatttttgtttccgcaaatttcaataacgcttcactcgaattcccatctgaatacatattccatttgtccgagaaccgcttcatttcttctgcatcaaatggctttttcgtcatttcctccaaaagagcttcactgtcatgacaagcctttccgggaatgacggaagtataattgtcgattaaaccgcgttttcgatcatattcctccagatcatacgtgaaaaagaaaatcggtttatttaagagcgcgaattcaaaaggcacggaagagtaatccgtaattaaaatatcagccgctttcaagagatcatgaagacgcatgtcagacacgttcttgatcaattcgctttcaaacgaagccgaaatatgatgcaaaacggcaggatgaagctttacaagcagcatatactctccgtttaacgcgtttgtgagctgttcttcggtgaatggcagccgaaaggactgcatatcataatccctgaatgtcggtgcgtacaggatgatttttttcggccatttgtgcttcggttcgggcttgtgttcttcataatagacgtcagtcagggggacacccgtttttaacagctggccgtcccgtatgccgaacgactttttaaaaacgtcagccatcgcgtctgaaccgacggtgacaaagtcaaacgagcggtacacttttttaaaacggctgatgtctgatgccggacggttttgattcgtcacatcctcaaggccgaactttttcaaagagccgttcgcatgccacacttgaatacatgtcgtttgcggccggcggtttaagacgcttgtcatgaggaaatagttatccgttatcaccgctttgctcttaaaaaggatcaaaaccgccttcaaaagatgcagcggatgtttttcgttcagataaaaagagccgagtccttccagctcttttttcagactgacggcgtgtctcgtatacaaaaccgtcacttcataagaaagcgattcagcgtgcgctttgtaagaacggatgagagcctgtgcattctcttcaaaagataccagcagggtcagatggttcttgggctttacaggcttgaacaaaacgcccagaacagacagatatatagaataaaaagcggcgaataaagatcgcaagttcatagattaccaatctcttttgctgttttatttgtttaaagctgtttcgtttgatcttctgcctgctcggaatacaggcttttatttgatttattatttctcaaaacggtaaaagcatacttcggaatgttcagcatccttttccatctccacggattcgtcaccagtctgtacagccattccagattcgttttgatcatccattcaggggcgcgtttcaccgttccgctgaacacatcaaagcttccgcccaaaccgatcgatacagcctgagggaaaagatgtttgtattcataaataaattgttcctgatggggatatcctaaggcgacaaacacgagatcgggtttcgcccgggaaatctgtttggcgacgaagcgtttatccgcttcataaccgttgctggctccgacaacctcaatattcggatactctttgccgatccggttcaaaacggcgtcaagcacgtcttgcttagctccgtataaaaatatttttttagactgccggtttgcgagaccgagcagcgacagaaatacatcgaatcccgcaattcttgatttcagcgggtgctgcgtcaaacgtgacattaacacgacgccgataccatccggcaggacgaaatccgcggaagaaatgacttgatgataacctttgtctttcgccgcagcgtatccgatctcagggttgaccgtcgcaatgacggctccttgcttttgtgcgatataataagtgtctaaatatgaaataaactcctgtaaatttccattaacataagaaaggttgtgcaccatttcagtctgcatctgccgtcctcctttttgtacgggattttctttcattttttcgtgacttaagctaagctttattttaacataataccttcagataaacttaacaatagttttacaaaaatataaataagataacaatttctttaatcaaccgcgcaaaaaccctgctaaactcctattgcaataacatttgttaataagtggaatttaacttcgttttacattagcttaaccttttcagggctatgtgatataatgaggttccatgagtacgaaattggcactttagtgattaaggatacagctgcgcagcatttcagggcagttgcttgttatacgtatgatgatagaaaggagcttttgtttcatgaagaaggtcattacttacggaacgtttgatttactgcattggggtcatattaaactgcttgagcgcgcaaagcagcttggagattacctagttgttgccatctcaacagacgagttcaacctgcaaaaacaaaaaaaggcctaccacagctatgaacacagaaagctgattctggaaacgatccgttatgtcgacgaagtcattccggaaaacagctgggatcaaaaagtacgtgacgtagcggatcacaacatcgacgtgttcgtaatgggagacgattgggaaggcaaattcgatttccttaaagatcaatgcgaagtcatctatctccctagaaccgaaggcatttccaccacacagattaaaaaagaaattgccggggtgtaattgaaacattcggatatacagatgataaagaagtactccctccggatagggagtacttcttgtaatataaggttattttcgctatatttgttatgcgcttttgaaaaaaagctagacaataagaggagaatttaaagatgaatcttagtaacttttttaagttgaataaaaaagagtccaagccgtccatagaagaacgcgaatataccattttaaacaaagaagcattggcggaagagaagaaggtagcggtagtcgttcctgtttataatgcagaagaatatgtaaggaaaacagttgattctgtgatccttcaaaacatcggctttcagcatatttctttaattctggtagatgattgctctaccgatgattccagaaacatcctgactgagtacgccgaattgtatgaaaatattacagttgtctttttgaaagacaacacgggaactccggcttatccgagaaacttgggaattgagctggcaaatgcgaagtacattacatttttggatgcggatgattggtttgcgccgaacggggttaaaatcttattcgacatgcttgaaagagatcatgtaaattatgcggtcggaaaaacgatcgaaatgcaggtgaacggtcaaaaaacgatcgggaaacatgagtcttcgctgaacagagcgaaggtatcgcctttttcaatccggcatattttctatcatctgggcccgcgggcaagaatgatgaacttacaatttctaaaagataacgatatcagatatccggaaatgaaatttgctgaagataagcaattttttatggatgttcttttggcgtgcggagatatttcaacgtcaaccgaaccggtctattatctgaacagaatggacaataatgagtcgctgacaaagcagaccaatataatggaaaaaaccgacacgaacatagccgtaatgaagtatattctgaacaaaaaattagatactgaaaaagagaagatggcgatgaaccgcctgattgaattcgattccattacgcggcttttcgatcggatgcacttcctgaaaagcgaaaacaaagaagcctactacaataaattcaatgaaattctgaatgtgttaaagaagacgaaatacgatatttccgagacattttttcatccgattcataaaacagcctaccgtctgctgactcaaaaacggtatgatgaggtcgaaaagctgttccgctggtccaaaaaagagcccgataaaaacatcgtgacgaaagacggactggcttatttagaaagcccgctgacggatgaagaaaataaactggtcgaacttcgcatgcacggagaaacggaaagcgcggtgttcgccgatcataaattcaccgttacgttccgcttgttcggacaggacagaaataatgcccaatatattcagtttcagcacagagataacatgaaagtacaccaccagtttccggttcagtcactgggagacgggcggtacgtccttgaaatcccgttaagtgacattgaaaaagtcggacttggcggttatattatgtatgtcatttataacgattatgaacgtgtcatgttaaacagagaagacggtgaaaaggtgacggcagaagcgaacggactgcaatatcaattctaccggacggtgaaggagaacctttcactgaaagtaacaaaatgatgattgtgattggatatgtttaattgaaacagaggagtagacttattttatgggtatagaaaatcctgtcagatacaagttaaaacatcttaacataaaggaagagacattcagcattacgatatcctgtgaaaatgtcactgcaggggaagagccttctcttcagattataaatcgtaaaacaaaagcggaactttccgtccctctgaaacggttggccggagagggcggagagtaccatgctgtcatgagcacggatctgctttctgaccatacggacggcaaaggatgtctggatttctatgtctcctttatcaatgatgacagtgatatcagtaaaaaacggttaaaatccagccttgaacctattgaactgtcttcttataaagatgaggctcatcatatgtactttttcccttacacgacgaagaaagggaatttctccttaaagctgctgcagaaaaagttcgtcacgcggattgatgaaatggagctcgaatctgacggcagcttacatctgaaaggttttgcattccggctgaatgcggcagaaaccttaaagataaaagaaaaaaacctgattctgaaaatgaaaaaaggaaaagaagaggagcctctcattctgaagtatccgcttcacgacgtgccgagacacgaccttgatgaatatgttcaggacacaacgatgcttgacacgataggctttgatacaaaaattgatttgaatgctgtttataaagaattgaatcagcagctcatctttcaattccatattcaattcatttttgaagatgccgggacaggtgaagaggttatcaccaacagcaaaccgttaaaggttctgaaatctgaacatgtaaaccctaaccaattcacggttctgaaaacggaaaaagggcctgccagatttcacgttttcacgaaaaagaaaacgaaaaatctccacctgagaatgaacgattacagcttcagcacccgcgtggagtattttgtgaaaggtaagctgaaacggggcgcttcctttgtacgcaagagaaagaataagctgaaaaagttcattgagaaaagaatacagaacacttacaaagcaggattcagatttgcaggaaaactgcctgtcaaacagaaacttgtcatgtttgaaagctttgccggaaaacagtacagctgcaacccgcgggcgatttatgaatacatgagcaaagagatgccggaataccgtctctgctggagtgtaaaccccgcttactcacagacatttaaagataaagggattccttatatcgaacgcttcacgttcaaatggctgtttgccatggcaagagccgagtactgggttgtcaacagccgtatgccgctgtggattccgaaacctgagcatacgacatatgtccagacatggcacggcacgcctttaaagcgccttgccgtagatatggatgaagtgcatatgcccggaacaaacactgaaaaatacaagcgcaactttacgacagaggcttcaaagtgggattacctgatttcaccgaacgcatattcaaccgaaatattcgcccgggcgtttcagtttaataaaaccatgattgaatcgggatatccgcggaatgacttccttcagacggataacagcccttctgtcattaaagcgctgaaagaaaaaatgaatcttccgcaagataaaaaagtgattatctacgcaccgacatggcgggatgaccaattttataagaagggaaaatacaagtttgaccttgatttagaccttcaccaattgagagaagcgatcggcgaccgttatgtcattattttacggatgcattatctcgtggcggaaaactttgatctcggaccgtatgaaggatttgcgtatgatttctccagctacgaagatatccgtgagctgtatatggtctctgatttactcataacggactattcctctgtcttttttgactatgcgaatctgaaaagaccgatgctgttttatgtgcctgatatcgaaacgtaccgggataaactcagagggttttactttgactttgaaaaagaagcgcccggcccgcttgtcaaagaaacaggtgacgttatcaaatgggtcaatgaaacggaatcagatgattataagcttccggattcgttcgggcctttttacgagaagttctgttatttagaaaccggagaatcgtctgaaaaagccgtaaaagtgattttcggggacaagtaaataagtgcaaaaaagcataatttaaccatgttaattatgcttttttgcttaagtgacggcatgttgcgctcatgggactcaggcttgttatgaagtgaaaaatacatcgtaatctgttacaattatgagcggtgcttttgtaagtcaaagctattacctaaaacttacgactaaggaagattagaatgaatgcattggtaaaaattctgaaagagcaattcaactcatttccgctgattatgcggcttgcagtgtacgaaacgaaatcaaagtatcaagtgaactatttgggtatattgtggcagtttctcaaccctatgattcaaatgctggcttactggttcgtatttggcctcgggattcgcggcggacatgatatggtgcttggaaatggagacagcgtaccgttcatcgtctggatgctggccggcttaattccttggttctttatcagtccgacgatactggatgcatctaacagcgtttttaaacggataaatttagtgtcgaaaatgaactttccgatcagttcactgccttctgtagtgatagcatcgaatttattcagttactttgtgatgatggcgatttatattattgtgctgctgagcaacggactgtttccgacgcttcactggctgcaatatatttattacttgttttgcatgatcagttttatgtttgctttcggcctgtttaattcaaccatcagcgtattaatcagggactatcagtttttgcttcaagccgtcacaaggcttctcttttttcttctgccgattttctgggacattgcggagaaatttggaaacagacctgaagttttgaccatcttgaagttaaaccctcttttctatattatcgagggcttcagagacagctttatggaagggcagtggtttttccacgatgtgaaatacacgctgtatttctggttcgtcacactgctgctgttaacagtcggttcacttcttcatatgaaattcagagataagtttgttgactttctttaatatagtaaggagattatacgatgaaactaaaagtttcgttcagaaatgtttcaaaacagtattttctatataaaaaacagtctgacaaaattaaaggattgtttttcccaaacagaaatcaaaaaggttttttcgctgtccgaaatgtttcttttgacgtctatgaaggggaaacgatcggattcgtaggtatcaacggctcgggaaaatcaacgatgtccaatctgcttgcaaagatcattccgccgacaagcggtgagattgatatgaacgggcagccgtctttaatcgcgatttctgccggattaaacaatcaattaagcggcaaggacaacatccgtttaaagtgcttgatgatgggtctcaacaatcggcagatagacgagctttatgaaaaaatcgttgaattcgcggatatcggcgactttatagatcagcctgttaaaagctattcaagcggtatgaaatcccgtctcggttttgccatatcggcgcatatggaccctgacatccttattattgatgaggcgctctcagtaggggaccagactttctatcagaaatgtgtggaccgcattacggaatttaaagaacgcggcaaaacgatctttttcgtcagtcattccatcggacagattgagaaaatgtgtgaccgggtggcttggatgcattacggcgaaatgcgtatgttcgacgaaacgaaagccgttgtaaaagaatataaagcttttgtggattggttcaacaagctttcaaagaaagaaaaaaagaaatatcaaaacgagcagattgaaggcagaacgcgggcagccgaggaacagaaaatcactcaggcccagcaaaagaaagcgaagcctaaattcattgccaatacgatacagattacgctgcttgcattgctggctgtcggcgcaggcgcttcgatgttttcagacaagcctctgcgtgcgatcacatctttcggtgacgtcaaacagagcgatgccggcctttatgagtctgtgaataaacctgctttggtaaaagctgaaaaggcggacctttacactgaaaaagatataaaaggaaaagcctccgcaagtgtaagtttcggtacgaaggtgcagatagaagccgagaataaccaggcggctaaagtgaaattaaacgataaagagtactttatgaaaaagactgatctatataaagtgaacgctttaaaaaagacggatgttcagctgaatgatttcagcggcagtttatcaagccaaacagcagaagagtttctctcatatctcaataaaagccgggacgatgtgcagcgtaaattgaaaaatccagctgcgggacaaacggctgacggacggaacgtattaaaagcatccgatgcaaaaacggatgtagtgattgacaatgatacagtctccgaagtggtttttcatttatcgcgtcctgcagacatctcagctttaagtgaaaaaggcggcagcaaaatcaatcagaatttgctcatgcttaaaaaccaggaatatactttttctgtgaacaatgctgataagacactgacggtaacgtctaaaaagtaaagatcacataaaaaaagctgccggattcggcagctttttctattcgtcagcttcttctttttcaagaagatccttcatgaacggaattaatttatggcggatatcctgatcctgtaaggcaaattcaagcgtcgtctcgataaatcctagtttttcaccgacatcgtaacgttttccttcgaaatcataagcgaagacacgctgaatgtcattgagcttttggatggcgtccgttaattgaatttctccccctgcaccgacttcctgctgttcaaggtacatgaaaatttcaggagtgaaaacgtatcttcctaaaatagccaagttggaaggagctgtgcccggttcaggcttctctacaaaatttttgacctggtaacggcggccttcatttgttaacggatcgataattccgtagcggtgtgtgtcgctttcaggaacttgctgaacaccgatgatggaagacaatgttttttcgtattcatccatcagctgacgaagtcccggtttttcagcctggacaatatcatcgccgagaagaacggcgaaaggttcatcgccgatgaagttgcgtgcgcaccaaacggcatgaccgagtccttttggctctttttggcgaatatagtggatatccgcaatatttgacgattttttcactttttgaagcagttcgattttccctttttcttctaaattgcgttccagttcaggggcattgtcgaaatggtcttctattgctctttttccttttccggttacgataataatatcttcgatgccggattcgacagcttcttcgataatatactgaattgtcggcttatcaacgattggaagcatttctttaggcattgcttttgtggccggcaaaaaacgagtgcctaaacctgctgccggaataatggctttgcgtactttcttcactgaataacaccatccttgtttctgcaaaatctttttttcagaactataacctagtctttttccactttaccacaattgattaaaattcacaccttttaatccgctttcaaagagtcttgtaacggtttttgctttgtttgccattaagctttacaatattaagaaacggcataaatatgttaacatgaagggatatccgacatataaaacgaggtgcagacaaaccgttgaaaaaactaaaagtaatgaccgtattcggtacaagacctgaagcaattaaaatggctccgctcgtattagagcttgaaaaatatcaggaaattgattcgctggtgactgtaaccgcacagcacagacagatgctggatcaagtgcttgaagcattcagcatcacgcctgattttgatttgaatattatgaaagagcgtcaaacgctttcagaaattacatctcatgctttgctgaaactggacaagctgtttcaagaagtaaaaccagatatcgttttggtccacggagatacgacgacaacgttcgccggaagccttgccgccttttatcatcaaatcgccgtcggccatgtggaagccggtctgcgtacgcaaaataaatactctcctttccctgaagaaatcaaccggcagatgacgggcgtgatcgctgatgtgaattttgcgccgacaagccaggcagaacagaatctgcttgctgaaaataaaaagccggattctatatttatcacgggaaatacggcgatagacgcgcttcaaacgacagtgcgggaagactattctcatccgatttttgacaagctggaaggaagcaggatgattcttttgacagcgcacagacgtgaaaatttaggcaggccgatggaacagatgtttaaggccgtcagaagaatcgttgaagagtttgaggacgtacaagtcgtttatcccgttcatttgaatcccgcagttcgtgaggccgcagaagcccattttgctgattcggacagggtgcatttaatagaacctctggaggtcgtggatttccataacttcgctgcgaaagcaaatttcattttgaccgactcaggcggggttcaggaggaagcgccttctctcggaaagccggtcttggtgcttcgggacacaaccgagcgccccgaaggagtgaaagccgggacattgaagctggcgggtacagatgaagaaacggtgtatcagctgacaaaacagctcttaaccgatcaggccgagtatgaacggatgtcaaaggcgtcaaacccttatggtgacggatcggcctcaaaacggattgcggaagaactgctttatcggtacggctatagaaaaacccgtccgcagccttttacagaataaaaaaactctgcatcatatgcagagttttttattatttcaggctttcttttaattcttttttgactgaagcgaggcttgcttcatctaatttgtaataatagatattgttgattctcgttcccgttcccttcagttcatgctgagtgactttgctgcgggcatttttatagtcagtcataaccgtccacatatcatcgaatgacatgtttgttttcatattgttttcaatgaccttaaacatatctccgaatttcgtgacagacgagatgtttgcccccttagaaataatcccttcaatcacttggcgctgccgctgctgtctgccgaaatcccctcgggggtcttcttttctcatgcgggtgtaggcaagtgcttcttcgccgttcaggctgatgttccccgttccgaaagaatgcccgtcgtagttgaaggcgaacgtgctgttcaccgtaatcccgccgagtgtatccacggtatctttgaagctctccatgtttactttcacaaaataatctaccggcacgtcgagcaggtcctcgacggtatccgcggccatttgggttccgccgaaggcataggagtggttgattttatccatcgtacctttgccggagattttcgtatacgtatcgcgcgggatgctgaccatttccgttgtattcgttttaggattgacggtcatataaatcatcgtgtccgcgcgccctttgtcatttttccgctcatcgactcccatgattaaaacagaaatcggatccttctttccgagatctatatccgtgtcacgtttgtccgatttttttaagtcttcctgaatgcttgccaccgttgaagccgctttgtgccacaagtagtagacgtagcctcctgatgataaaactaacagcccgatgattgttacgattgtcagaagaacctttttcttctttctttttcgttcagctctcatttgtcatcaccttttctattaactttcatgatgcaatttactaatctttataaacccagtcatatttttacttataaccatgtaatagacgaaattcttaaaaaaaaggttacaaaaagaccttaaaattaccttaaaaaaaagttagtataagacgatacataaagatgaggtgaaaaaaatgaaaaaaactattgcagcttcgttcttaatactgcttttttctgttgtattggcagcgtgcggaacggcggaacaatcaaagaagggaagcggttcttcggagaaccaggctcaaaaagaaacggcatattatatcggtatggcggatacgcacacaattgaagtaaaagtggatgatcagcccgtcagctttgaattttctgatgacttctctgatgttctgaataaattcagcgaaaatgacaaagtcagcattacttatttcacaaatgataaaggccaaaaagagatcaaggaaatcgagaaagcaaaataatacaccatgatcagcaaaaggcgggataaaaattgaagaaaacaatatgggctgtctgtttttctgtgatattcagcctggctttattaccggaaagcacttttgcggccagttctgatatctcagtaaaactgacgaattatattggtaataaatcgactctgaatatcgaaccttcaggaacttataaactgacgggaagcgatgtgtcctccgttgtcagattgggaggcgcgtccaaatatgatacggctaacgccgcgacatctaagtattggaaaaacccgtccaacgtagtcgtcgtgaatacggacgcttattttgcggacacgctttccgtcattcctttagcgaataaactgaaagcgcctgttctgctgactgaagcgaaaaaactgagcagcagcacagaagcgcaaatcaagaaattcaatccggataatattttaatcatcggcgggacgaacagtatttcgtcagccgcggaaaagacattgaagaaatacggccgtacgaaacggatcagcggaaaaaacagatatgatctgtccaaaaatattgcggccgaaatgggcagctatgaccaggcggtcgtagtaacgggggatgtatatacggatgcgctggcaatcgcgccatatgccgcgcaaaacggctatccgattcttctgacgaaaaaagactcccttccgagctacaatctgcctaaaaaagtgatcatcatgggaggcacttcaagcgtcagcaaagatgtggagaatcaaattaaaaagaaggcctcggtcaccaaacgaattaccggatcaaacagatatcaaatatcagcaaacgcagtcacttcgcttggcatggatgcaagcaaaacggtggctgccaacgggactaaattagcggacatcgtagtcggatcaaatattgccgccgcaaatcacatgccgcttgtatacatcaaaaaaagcgaaacacccgccgacgaggccggcctttttaaaacgaaaggcacctattcttatacattaataggcagcgcgaattcaattgccgattcagttaaggctgcttacgcaaaagagttttatctcgtaaacggaaagacgtaccgtattgaaacgtccggcggcaaattaggcgttgcaggcattaacagcggaaaaacgtctttcaaggcggttcctgaaaaatattcaacagcaaacacaatcagcattgacgggaagccatatctggggaatatgagtttcactgctgaatccggcaaatatgtaagacctgttaatgaaaacattccttttgaggattatctgaaaggtgtcctgccgaatgaaatgccgggaagctggccgacagaagcgctgaaagcccaggctgttgccgcccgcacctactctatcggcaagatgggacaaacagtcgcggatacaacggcctttcaggtttacgggggatacagctggtatccaaacgccaccgcagccgttaacggaacaaaagggaaagtgctcacttattccggcagattgatagatgccacttactcatcaagcaatggcggttacatggaagccggcgatgaagtgtggggatcgaaagtgccgtatttagtagccaaaaaggacacaaaagatcccgaaatcagctggtctttaacattgcagaagcagcagctgccagcgggtctggatatgaaaaatcccgcatcctggtggtctaaaacaaacgaagcaaatgctgcgcagctcaacggaataaaaaattggctgatgaaaaataaagaaaccaatgcaagttccataaaaattgcaagtatctctgatctctcgctcaccggaaaaacaaaaggccagcgcgcggaagacgccgcggtgaaggtcacgtaccatgtgaatgacaagtcgaagggctatgtcatgaacaagactgcatctgttgaggtgaaagcgtctgaacttaggacgatgatcggagcttcatcttttaaaagcacatacgccagtgcgtccggtaattcttcgcaaatcacgatatcaggaaagggatacggtcacggcgtaggaatgagtcaatacggagcaaaagaaagagcggaggccggagagccgtatacttctattcttgcgttctattatcctaatacagcacttacaaactactaaacttctgtggaggagatcggattgaaattcatcataaaatgtctccccgtctttattctcggggtcattctatttgtcccttccgctttggctgacaacacggttaaaaggatcggcggaagcacccggtatgatacggctgtactggcggcaaaacaatcatggggtgaagcgaaaacggtaattatcaccggcggaacttcatatgccgatgcaattgccgctgcgccgcttgcatatcaaaaaaatgcgccgctgctgtttacaaataaagatcagctgtctgccggcacaaaaaagggattaattgatttaaaaacgaaaaatgtgattatcgtaggcggcacacctgccgtttcgaaaaataccgcaaatcaaattgctaaattaggcatcagtgtcaaacggttatcagggagcacgagatatgccacagccgcaaaagtggcgggtgaaatgacaagatcttctacagcccttgtggtcaacgggtttgttgatgcggatggaatggctgcgatttcttatgcgtccgctaaaaaatatccgattttattcactaatgattcaacgttaaatggttctgcgtccaatgcgatcaaaagcttagggattaaaaacacgattgtcatcggcgggacaagcagcatcagcagctcactttataataagctgccgaacccttcgagaatcagcggcaaaaaccgctataacctgtctgtgaatcttgcaaaaaagacaggcttaagcacaggctatacgtttgttaccaatggctttaaagaggcggataccatcgtcggaggcgtgctgagcgccaaacagggaagagttcacctgctgacgaatggagacagtctgtcaaaagacgtccggacgtatatcggaagtaaaaacatcaccagcttcaccgtcataggaagtgcttcatctttaagcaacaatgccgcgtcgcagcttaaaaatcccgttgtcggcaaaacggtctttattgatccgggacacggctatcaggattcaggtgcaaccggaaacggcttgcttgagaaaaatgtaaaccttgatatcgctacgcgtcttaacaatcaattatacggcgcgggcgcgcttactgtaatgtcaagaaagggcgacacctttgattcgcttgaggagagagtgaacaaaggggcgaaggcgaacgccgatattttcatcagcgtccatgcaaatgcgaatgataacagcagtgcaaacggtacggagacgtattatgataaaacctaccaatcggcaaacagtctgaggcttgcccaaaatattcagccgagaatggtttctgctctcggcacgcgtgaccgcagtgtgaaaactgccggattttacgtcattaagtattctaaaatgccgagtgtcttgttagaaaccggttttgtcacaagcccgattgatgccaatattctaaaacaatcaacgaaaaaggacagactcgcggcggggatcacccaaggcgtttcctcctatttcagataatttttttcatggaaacagaccggttcataccggtctgtttttttattttttcattatgctttgtctcaaatatggatatgaatagatttacaataaaaaaacaataatcgaaacattctaataaacattaacgtttcctttacttccaattaacatccatctgctaaactcacggcataggtcatcaaacatcccaacaaatcgtgaggtgtgtgtcagtgggagcagagaaaagcatgaatgtaaataataactatgcagtgcggcaggggacttccgctgccgttacggaaagaacggcccgttatttggcttttaagcgattcatggacattgtgtttgcgcttgcggggcttttggcggcgctcccggtgatgggcctgttctccatactgattcgtttggagtcgcccggcccggctttttacaagcaggagcgggtaggcaaagacgggaagccgttttatttgtataagctccgctctatgaaaatagatgctgaaaaatcgggggcggtctgggcgctgaaaaaggatccccgcgtgacaaaggtcggcgcttttatcagaaggacccgtattgatgagctgccgcagctggtaaatgtgcttcggggagaaatgagcctgatcggcccgcgtcccgagcgtcccgtgtttacggaacagtttcaggctgagattccggggtttacggagcggctggccgttaagccgggattaagcggctgggcgcaggtcaacgggggatatgacatgacaccgagggaaaaactgatgtttgacttatattatatccgcaacctgaccttttcattggaactgaagattatgctcaaaacgtgcaaagtgatctggaccggtgacggggcgcgataaaaattctggtcagcagacaaaaaagtagggaaaacgatgcctagtattacaaatcaaattttgagcggcgccaaatggacaagtatttcgacagcgtgtattacggtcattcaaatcgtccaattcgccctgctcgggcgggtcatgtcactggctgaattcggccttgtcggcatgatcacaacggtagtggtgtttgcccaaattgcgcttgatatgggttttggcgccgcgctcattcaaaaagatcatgtgactgataaacagatgtcttccttgtactggctgaatatcataacggggcttgcgctgtttgcgctgctgttcttcagcagtccgctcattgccgatttttatcggcgggaggagcttgtctatttaatccgcgtgctggccgtcatgtttttaatcgcgccgatcggtcagcaatatcaatatatgctgcaaaaagcgctggcatttaacacgctaagcaagattgaaatcttttcaaatgtgctgtccttcgtttacttggcggctgcggttttttatacggacccgattctcgcctatgtgatttcccaggtgctgctgcaatcgtcaaaaggtattctgtactgggtgtcctgcagaaaaacatggagaccggtgttcgtttttgatctgaagggaatgaaaggcttcttttctttcggagcctttcagctgtcttcccggcttgtgaaccggctcggggcgaatattgatatgattctgatcggcagttttatcggcgccgaggcgctcggcatttacaatctggcctaccagattgtcacgcttccggtattaaaaatcaatccgatcattacgagagtcgcgtttcccgtctttgcgaaaaacaagcatgaaaacagcgtgatcagagaaggttttctcaatatgaccaaaatactcgcgctgatatcctttccgcttttgctcggtttggtttcagtatcggatgcattcgtggcttcggttttcggagaaaaatggctggcggctgtcccggttttaaacgttctcgccatcgtcgggattttaagggttctgatgaatccgaacggatctgtgctgctggcaaaagggcgggccgatctggcattttattgggacgccggggtgatgctgctgtatggtgcatctttgtacgccgccgtgctgtccggaaatctcttgacggtagcctggacgtacgctttcatcagcatcctgaatttcctgatcgggcgctggctgctggcatatgtcattaagctgcggctgtcggcttacttcaaagccgtggccaaaccgtttctgcttacggcggcaatgggtgtcatcgcctttacagccagcttcgggacggagcggatcagccttgatgtcaagctgcggctggcgatctccgtatcctgcggagcgttgtgttatttgttcctgttaggaaaagcttatccgcatatgaaaagtaaattaagaaaaggacgtttgctatgaaggtattgtggatgacaagtgtatatccgagcagtgagaagccgggagaaggcgtttttcatgagacgcaggcccaagaactgagaaagcttggcgcggagatgactgtcatttgtccccggccgaaactcgccgcgccattccgggtgctgaaaaagacgtatcggcaaaaggatataaggccggcgcatgaatggcggaaaggcgtgtccgtccaccggccgttttatcaggcggttcccgggcagctgaaatgggcgcagccgcataaaagaatggcgtcatcggttctttccgaaattaaaaatcatggcctgaagcccgatctgattcacgcgcatttcgccatgccgtcaggcggagcggccgccattgtgtcaaaggctttaggcatcccgtatgtgctgaccttgcatggcagtgatgtcaatgtctatccgcattacagcaaaagcgctcatcgcgcatttacatttgcggtgcgggaagcagccgatatttacgctgtgagcggcagtctgcgggaacaaatgaaaaagctcatcgaagcggagtgcagcgtgcttccgatcggcatcacgcttgacgccttccgaaaaaggaacgagacgaaagaagccgtcagaaaacggctcggccttcctccggataaaaaactgatcgtgttcatcggcaggcttgtcaaagagaaaggtgttttcgacttatcaaaagccgttcagtcattggatgaaagatatgaagctgtctttgtcggtgacggtccagccgcatcttcattgcgtgaagccgctcatatcgtcacggggcaagtgccgaacgacaaggtacaggactatctgctggcctcggatgtaatggcgctgccgtcctacagcgaaggcatgccgactgtggtcattgaggcgctcgctctgaaggtgccggtgatctgtaccgatgtcggaggattggcttctttatttgggaaatatagaggtttgctgatcaagccgggttcacctggcacgctggcagaatccattctgcaatatgacgaaggagaggcttggacgccgcaaacagccgaggaactttatcaaaccgtccgcacgtattttgacgcaagccaaaacgcgaaagcgctgaaagagaaataccggtccgtcatgaaccggtccgggcaagaggagaacctttcgaaagagggatgaagctgtgaaaaaaatcgctgtattaggaacagggtatgtaggtcttgtatctggaacttgttttgcggaaatcggccatcatgtgacttgctgtgacatcaatgaagcgaaaatcagaagcttgcaaaacggagtcatcccgatatatgaaccggggcttgaggaattagccgaaaaaaatgtcagtgacgggcggttatcctttacggccgatattgagccggctgtgaaagccgctgatatcatctatatcgccgtcggtacgccgatgtcaaagacgggtgaagccgatctgacctacattaaggcagcggcgcaaacaatcggagaacagctgaacggatacaaaatcattgtcaccaaaagcactgttccggtcgggacgggaaagctcgtttaccaaatcgtcagcgaagcgtcaaagggaacatatccgtttgatgtcgcgtcaaatcctgaattcctccgcgaaggttcggcggtgcgggatacgatgcagatggagcgggcggttatcggcgccacaagcgaacatgccgcttcggtcattgaagagcttcataagccgttccgtacgaagatcgtaaagaccaatcttgaaagcgcggaaatgattaagtatgccgcaaatgcttttttagccgccaaaatatcttttattaacgatatcgccaatatttgcgaacgtgtcggggcggacatttctcacgtgtcagaaggcgtcggtcttgacagccggatcgggaataaatttctgcaggcgggcatcggattcggcggatcctgctttccgaaggatacaatggctttattgcatatcgcaaacgccgccggctatccgtttgaaatgatggaagccgtcattgaaaccaatcagaagcaaagggtccgtattacggaaaaattgaaccgcgccatcggtcccttaaaagggaaaaccgtggccgtactggggctggcctttaaaccgcatacaaatgacgtccgctccgccccggctcttgatatcatcacaagtcttaaagagcagggcgctcacgtgaaagcgtatgatccgatcgcgattcccgaagcggcagcgatattaggagaaggcggcattgaatatcacgcagagatgtacagtgccatcaaaaacgcggacgcatgcctgattacaacagattggccggaagtcaaggagatggatcttcagagagtgaagcggctgctcaaacagccggtcatcattgacggcagaaatatgtttccgttggagtatatgagggtttcaggattcacttatcattccgtcggacgtccggcggttcatgccgatcggcaaataaaagaactggcaagatagaaaaagatttgtcttcaggctctcggcagcccggctcggctgccggttttggaaaggggtttgccatgtgagtatcaaacgttcagcggcacatgttcttgtgctgcttgccgctgtcattacaggaggattcatcatgctggaggcggtcagggcggatgccggcctcggaaaaatcaccgtgctgctgcttgccgccatgatcggtattgccggacttgctttgctatccgcctttacaacaaacggtcagatgtttatggggctcatttatatactgatcgcgtgtacatttttaaaccaggccttctttgcggttcatctcggatttttcagcttatttatataccggctgttattaatcggagcgggcgccctacacatcgccggcatcctgacaaaccgtcatcatattgacagatggaatcgggtgaatgtaaaaggggttctgatgtttttcgccttatggtttacatacggtctcctatcgttattgtgggcaaaatccgtgacgtacgggattaaatatttagctttaataggaatgggcatgtttttgatttatcttattgtcatgttcattcagcgctttgatcagctgatggttttttacggcatatggcttgtgatgaccatttttgtgatggcgatcggcttttacaaccattttacacacaaccatctgccgagctccacgctttataacggcccgcagtacaaacagcattatccgacgtccgttttctttaatcaaaatgatttcgcgacgtttttgtgcatcagtttctttctgtatgcggcggcggtgaaaaatatgaaaaacggctatgtgaaggccgtcagcctgctcttagcgatctgcgctttgtatttaatcattttgaccggttcgcgcgcgagtctgctgggcatatgcgcgggggcggctgtatacgtcttcatcctgctgccttctctgttgaaaaaattcgcgctgtacgctgcgggagcgggtgctgcgctgtttgcggttttatttgcgggccgtatcaccaatgccgtcttgaatctgttttcagctccgcaggcgatgccgggacagcagccgcttccttccaacctcgccagggcgaatcttttaaagaacgcctttcactatgtaattgattcctgggggtccggagtgggtgccggaaacgtctcttactatttaaaagcggagcccgtttatgatacgggcggcgtagttgaggtgcacaactggctcgtcgagattatggcgaacttcggcgtacttacgatgctcggttacctgacagtctatttgttccttttttggacactttataaatgtcatgaaagaaaatcggaaaatcagtcaagactgatcacagaaggacttatcacggcgatggccggttttttggtaagcagcatcagcccaagctccgtatcgaatttatttttccactgggtatttctctcgctcgtgatcgcggcggtcaatatattgaggcgtttacaaaaggagcctgccgtcacggcgtactatgaaaaacagggagatgcgagatgaaggatatgttgacaagaataacccggcgtatcaaaaagaatatcatttggatcattgcgctgcccgttgtgttaggggcggcgggatatgtattgccgtcaaaaatcagcggaaacagcagttttacatcagaagccgcgatcgccgcgggaaattatgatcatccgctttataacaatacaaaagaaatcccgctccttttgacgagcgatgcctttttaaagcaggctctgcctcataaaacagacgaagaaagagcggccgtgaaaagtaaactgactgtcgaaacacaatcagattcattgatcacggtcagctgcagcggccaaaacaaacaggaaaccgaatcggtgtttcaagccgtcataacaacttttctgaagaatgatcaggacctgtttgaaaaacgggcaaaagtagtgcggcagagtattgctgcgcttgaaggagaaaccgtcagcgcggacgccaaagtggataaggaacgatttttatacgaattgaaaaatacgcagctgaacctgaaagcggccggcgtcatcaattcagagccgatgaatgaaacggctggtcaaggcatgccgccgaaaaagaaagcggttctgggcgttttaatcggcattgcagttgcctttatgttcattgtcattcctgagttttttagagagtccttgtaaaaatctgcgatggagatgtgaccatgacaaactggaaacctttcgtatctgtcattacaccgtcttataacgcaagtgaatatatcgaagacacgattcagtccgttttacaccaaagccacccgcattgggaaatgattatcgcggatgattgttcaacggacggaacgagagatattttacggcaatatgaacaaaaagatgagcggatccgcgtcgtttatttagataaaaacgggggagccgcagctgccagaaatacagcccttaaacatgccaagggccgttatgtcgcatttctggacagcgatgacagatggaaaaaggaaaagcttcaaaaacagcttgcgtttatggcagagcggtcctgcgctttttcatttacgggctacagcgtcatggagcaggacggaacgccgacggacaaaacgattcaagcccctgaaagcctgtcatatgatgaagctttaaaaaacacgattatcggatgtttaacggtcatgattgacagagagcagacggggcagattcaaatgcctgatatcagaacgcggcaggatttagcgacatggctttccctgctgaaaaggggatttacggcttacggcctgaatgagtgcctttcagaatacaggcttgtgcagaattcgatttcaagcaacaagtggaaagccgcaaaaaaaacgtggtttgtttatagagaaattgagcgcctgcattttatcaaggcttcgtggtgttttatgcaatatgcgaaaaacgcggtcttgaaaagactgtaggcgtcagaggagctgggtgatgaaggtggaaccgattattcacgtaatcgtcggagcggcggaatgggggcatgaccggctgagatacagacggcatcggctggctgaatttcttgcccggcaaaaagaaacgaaaagcgtcatttgggtatgcccgtccccgcgagccaatgatgatcagatggccgggatcgccgagggaatccggcagttcactgtaaaggatctcatgcagcaaaaagcattccgtttcggcaggtatacagacatgtgttacaggcataaactttcaccattgttgcacatgctgaaggaagaaggagaaggggcccgctgctgcttatggtacaccttccccggtttcccgcttctggcagatctgtttccttgggatgaagtgatttacgattgcagtgatctgtgggccgctccgatcagcggccgggccggtgtgctgtcaaatgtaagaagaaacatcattaaacaggcggaaatgagaatcattcagcgtgccgattccatcacctgcacatctgactgtctgcaccgggaggtcggaaaaaagctggagaacccgcaccagaaagtgttcaccattgaaaacggagtggaatatgacctgttttcacgggaaaataaacagccggatgaagacattttacggggacgaaacggaacggttctcggttttatcggcggaatcaaaccaaagctcgattttgcgcttatggcggaaacggcagatttgcggcctgactggacgattttattggtgggcccgaacacggctcaggacgatccggatttcgagtcgcttctggaacgcccgaatgtcatctggacgggacctgccgcgccgaatgaagtgccgtcctatatgcagcttgtcgacatcggcatcatgccgtataaaaattcaccttataatgacgcggtatttccgcttaagctttttgaatttttagccgccgggaaaccggttgtcggctgcaacctttcttctacgtcaaaaatcaaaaggccttacgtttatgaatacgttgaagggagcgaccccgcagatttcatcgcggcctgcgaagcgcttctggcagcggaccgccgcggatcatacgaggctttgcgccgtgaattggcccggggacgggattggaatgttttattcggccgaatgcttgaatgcacgggtatattggaaaatgcgcaatcccattaaaagggaaagcgcattttttgatttgcgtgtttctttttgatgatgcttgttataataactagtaagaattataatggaaggaacggttcaatatcagaaaagacttcatataattccaaaggagacttctttatgcttgacgaacgcatgtttcgcatagttgttgcgttttttgtctctctgctaacggttttaatcctaactcctatcgtaaaaaaaattgcgatcaaaataggtgcagttgaccagcccagcaaccgaaaagtacatgataaaataatgccccgtatgggcggcttggccatctttatcggcgtagcggcgggtgtgctcgcggccggcatatataatgaaacgaaaatgaccgccattacggtgggtgcgtttattattgttattttaggaatccttgatgataaataccaattaagcgcaaaggtaaagtttttcgtccagctggccgtggccattatgattgtgagcacgggactgaaaatggactttttctccgtaccgtttttaacggaacgtttagaattgggatgggtcgcttacccgctgactgtgttatggatcgtcggtattacgaatgcgatgaacctgattgacggtttggacggactcgctgccggcctgtcggtcatcggactctccactatcgccgttatggcgttgtccggagggaaaatccttattctgtcactttcacttgtcgtgataggaagcacactcggatttttattttataattttcacccggcaaagatatttatgggagataccggatcgctctttctcggatacgtcatctcagtactctcattattaggtctttataaaagtgttactttattcagtatcatcattccgatcatcattttgggcgtgccgatttttgatacgacattcgccgtcatcaggcggattttaaacaaacagccgatctcagcgcctgataagtcacatatacaccaccggctgatggccttcgggctgtcacaccgcacggctgtcattatcatttatttaatcggctttattttcagcgtcagtgccatcctgctgaaaagcgcgaccatttggctttcgctgtttattatttttgtattgattgtatttatgcaaatcatagcagaggtcacagggttagtaaatgaacaatttaaaccatttaccaagttttacaaaagattggtaaagaaaaattaaaaagagcagatcatgcgaatggtctgcttttttgctattctcttattatatagaaaaacccgatcctgctcaaaggatcgggtttactcttaatagcctgttgtgccgccggactgtgtgctgtccgtaccgtttgcacctgcagtaccgttggttgaatcggttgtgccgcttgttcctgtgctgccggaagtcgaatcagccgtaccgcctgttcctgtgctgccggaagttgaatcagtcgtactgtccgttccggtgctgtcagaagcgggatcggatgccgtgctgtttccggacgggtaatccaggtgcttctgcaattcctgccgtactttctcgagattggttggatccggctggaaataatatgttccgcgcgtagttgcggttccgcctaaatataaatctgatcctgttatggtcagtgtatcaatctttttgctggtaaatccgctgtaaatctgctgaagagcgagtccttcagtgattcggatattcgtttggacattattgctcgctgtttcagcgattttatcgattttagcaatatttccagctctggacatttggtcgatcagtgcgtttaaaatttgcttttggcggtcattccggccgaagtctccgcgcttatcctgctttctcatccgcgcgtaagccaaagcctgctcaccgttcaaatgcatgtttcctttcttgaaatagatccgtttctttttactgacgtcactcatctcgtcgaagtcaaacggcacttttacatcgaccccgcctacttcatcaataacatccttaaagccattgaagtcgacagtgacatacttatcaatcggtatgcctaataagtcttcgacggttgagacggtttcatccgctccgcccttagcaaaagccgcattgatttttgttttgttgccggttgtgtcgccggcaagcgtcacccgcgtatcacgcggaatactcagcattttcattgttttatttctcggatcaagggtaacgacaataagagaatctgatcgtccgccttttccgctggtggcataattttcgatccccataaacaaaatggagaacggttttttcttcatattgatgactttatcccgcaattttgatttttctccgcgggaaagggcatcatatgcattatctgccgcattgatcgttttgtatactttgtatccgccaaatccggcagcaactaacaaaacgagggtaagcagcagcaaaatccgtttgaatatgatctttcgtttgcttttctttttctttcgaacacgcactcttacacgttcagccattacattagtctcctttagggctgacgtctgtttctaaatacgtcagttctccctctgtattcttactcttgccgttcgtcagttctgtcatccattttagaaacgcttctttgtctttttcttcaacgtacgtttcaaattcgacatgatccgcataatggatatctttcagtaaaaaaactgattctctcagttcgttctctatcttgccgagccacgtataatccgctgatgtatgcataatccgcatcagcttccgctccgtaactcctatatgatttaagccttcagacactgacttcccatatgcacgaatcaatccgcctgcaccgagctttattccgccgaaataccgggtaaccaccgcgcaggtatctttcagaccgcgttttttcagcacttccagcatggggacgccggctgtgccgcttggttctccgtcatcattggccttttgtatatggtcggtttcgccgatcagataagctgagcagttatgagtcgcattccagtgctgtttttttatcttttgtataaattcctgcgcttcctcttcagaagcagcacggctcaggtgacagataaaacgtgatttttcaatcacaatctcatgttcacccgtttctttaacagttaaatagctgtgcagcatgattgctggaccctcctgacaagcattaaaagacttgtttctacaaattcgaacagactttagaatttttgcgcatattttggtatcatgaaagagtaagatactatataaaaatgtttttttctagaatatacgcattctttcattataattcgacataaattgcagttcaattacatttataataaaaatacataacaacaccgttacggagggagacagatgaataaatcgaagatggactccaaagttttggattctatacttatgaaaatgctgaaaaccgtggacgggagcaaggacgaggtttttcaaatcggagagcagtcgcgccagcaatatgagcagctggttgaagaactcaaacagatcaaacagcaggtgtacgaagtcattgagctgggggacaaacttgaagttcatacgcggcacgcacgaaaccgcttgtctgaagtaagcagaaatttccataagttcagcgaagaagaaattcgcaacgcctatgaaaaggcgcacaaacttcaagtggaactgacgatgatccagcagcgtgaaaagcagctgcgggagcgcagagatgatttagaacgccggcttttggggcttcaggaaatcattgaacggtcagaatcattggtcagccaaataaccgtcgttctgaattacctgaatcaagaccttcgccaagtagggcttcttcttgccgatgcgcaggctaaacaagatttcggcttaagaatcattgaagcccaagaggaagaaagaaaaagagtttccagagaaattcatgacggtcccgcgcagatgctggcaaatgtcatgatgagatcggaattaattgaacggatcttccgcgaccgcggcacggaggacggatttcaggaaatcaaaaatcttcggcagaatgtgcggaatgccctttacgaagtcagaaggattatatatgatttaagaccgatggcattggacgatctcgggctgattcctacactgagaaaatatctttatacaactgaagaatacaacggaaaggtgaaaatacattttcagtgtatcggagacacggagaacaaaaggcttgccccgcaatttgaagtggcgcttttccgtctcgctcaggaagccgtcacaaatgcactcaaacattcagaatcagaggaaataacagtaaaagtggaagtaaccgctgattttgtcgttcttatcattaaggacaacggaaaaggctttgatattaaggatgctaaacaaaagaaaaacaagtcatttggcttgctgggaatgaaagaaagagtagatctgcttgaaggaacgataacgatagactctaaaataggtcttgggacatttatcatgattaaggttccgttatctctcggcctataatttgttaaatagagccaaaagacatattgaccgaacagcggcgtatatagaacaataggataaggaggcgtagcgtgtgactaaagtaaatattgttattatcgacgaccatcaactattccgtgagggtgtaaaaagaatattggattttgaacctacctttgaagtggtagcagaaggtgacgatggagatgaggcggctcgaatcgtcgagcattatcatcccgatgttgtcataatggacatcaatatgccgaatgtaaatggagtagaggctactaaacagcttgttgagctgtaccctgaatctaaggtgattatcctctccatccatgatgatgaaaactatgtgactcatgctttaaaaacaggtgcaagaggctatctcctgaaagagatggacgcagatactttaatcgaagcagtgaaagtggtagccgagggcggttcttaccttcacccgaaagtaacccacaatcttgtcaacgaattccgccgtcttgcgacaagcggagtttctgctcatcctcagcatgaggtttatccggaaatccggagaccattacatatattaacgagacgggaatgtgaagtgctgcaaatgcttgcagacggaaaaagcaaccgcggaatcggtgaatcattgtttatcagtgagaaaacagtgaaaaaccacgtgagtaatattttgcagaaaatgaacgttaatgaccggacacaagccgttgtcgtagccattaaaaacggctgggtagagatgcgttagtcatgtatgagaagacttgccataataggcaagtctttttttacagcttcatatctattaaaatacttattaagtacttaataaggcaggtaaagtgatgaagattgcagttgtaacagacagtacagcatatattccgaaagagatgagagaagaacatcatattcatatgattcctcttcaagtggttttcggtgaaaaaacattccgcgaagaaacagaactcgactggagaagtttttataaagaagtaaaaaatcatgatgagctgccgactacgtcccagccttctttcggtgaattaatcgcattgtacgaagaactgggcaaaacatatgacgcagtcataagcatacatttgtccagcggaatcagcggaacttataacagcgccgcctcggcaaacactatggttgatcatattaaagtttatccctttgattcagagatcagctgtttggcgcaaggtttttatgcattaaaggcagcacagctcattaaagacggtgttgactcaccggaagagattattaaagagctggaagaaatgaaaaaaacagtccgtgcgtattttatggtggatgatttatcacacctccagcggggcgggcgtctaagcagtgctcaggcttttatcggcggtctgttaaaggtaaagcctattcttcattttgacaataagataattgttccttttgaaaagattcggacacgcaaaaaagcgatttcgagaatttttgaactgtttggggaggatgcaagtaaaggaatcccgatgcgggccgctgtcatccatgcaaacagggaagaagaagcggcggatattatacaggagttaagcggtaaatatcctcatgtcgaattctataacagctatttcggtgccgtgatcggaacccatttgggcgaaggcgccatcggaatcggctggtgctttaaaaactaagtgaaaatctccgttttcaagggcggagatttttttattattaaattttcgtgattcgacaaaaaaattcccggcaggcatactttgaacagaaaggaggcagggagatgtccgaaggtgcttcagaattttcagaggtgcgggatttcttttacggccggcatttattgagatctgagataccgttttcagatcagcgcatcaaccgttttatagaaaaagagcatataacggccgagccgtcaatcatccgccggaaaaaccgttacgtctgccaacgatgcggtcagtctgatcaagcctgctttgcggcattttgggcgccctctgccaaaaggcagattacctattgccgtgcctgtgtcatgatgggaagggctgatgaactgacatcattatattcttggaatcaagcccctgaaaacagctgggagcctgtaaagctttcttgggaaggaacactgacagacggacagaagcaggccgccgccgcgcttacagatgcgataaaagagagacaagagctgttagtatgggcggtttgcggatcggggaaaacagagatgctgtttcctggtatcgagtttgccctgaatcaaggtttgcgcgtctgtgtcgcgactccgcgtacagatgtcgtacttgaactgctgccgagactgaaaaaagcatttgagaaagtcgacgtttctgctttgtacggcggcagcgaggacaaaggccgcttgactccgctgatgatttcaaccgctcaccagctgatgcgctaccgagacatttttgatgtcatgataatagatgaagtagatgcgtttcctttttcagccgatgagacattaagattcgctgttgataaagcgaggaagaaaaacagcgcccttgtttatgtaacggcaactccttcagacacattaaaaaagaatgctgaagccggtttgctgaaaagcgttcgcataccggccagatatcatcggaaacccctgccggagccgcgttttttgtggtgcggcaattggaagaagaagcttcagaaaggaaaactgccgcgctctgtaacggattgggtccgccaaaaacttcaatcacagctgccggttttcttattcgttccgtctgtacacgtattgaaaaagacaacggattattttcagaaattaaacatacgggcagaaggcgtacatgcggaagacacattcagaaaggataaagtgaaacgattcagagacggccggcttgatctgctggtaacgactacgattttagaaagaggggttaccgtgcccaaagttcagacatgtgtcctcggcgcagaagcacctatctttactgagagcgcgctcgtacagatcgcgggcagaacgggaaggcattataaacatttcagcggtgatgtcgtcctgtttcatttcggaatgacaaacggaatgaaaaaagcaaaaaaacatatagaacttatgaacaaattggcacaaaaaagtaaattgttggactagttaatttcagaaaacatgatacagtatactcatactttcctatgaggagctgtcagcatgcttgtcaattctaaagaaatcatattaaaggaacttctcgaccgccatatgcctaagcttcatatgaaatgcacatgccgggtatgcaaaaatgatgtactggcactttcattaaaccgggctgagccggcatatgttacagataaaaagaaagttgcttatgcaaaagcagagatagttgataaacagaaaaatacggcgctgcttgtcattctggctgaatcagccgcgattgtttcggttaatccaagcgagttctgtgaaacttgggaaggagcgtaatatctctgaattgtttattgtgtgactcaccaatttcaagttcattgacttggagatctttgttttctctggcgcccgagcaagaggtatgcaccatatgcagcagccgattcgaaaaaattgaaggccccgtatgcagtatatgcgggaggcctcaggagtcaaatgaaaaatgcgctgattgtgcggcccgggaatcaaaaacggaaaagcgctttttgctgcggcaaaaccgttcggtatatttgtataatgatgcgatgaaggactcattagcccggtttaaattcaggggtgatgcgaaaatcattcaagcatttggacgtgactttgctgccggctttaaagcggcatatccatcaaatacacatactctcatccctattccgctgagcggcgaacggctggcggaacgcggattcaatcaatccgagctgctggcctctctgctcggaatgcccgtcattttccccctcatccgactgaacaatgaaaaacaatccaaaaagagcaaaacagaaaggctgtccgcagaaaaaaagttttcagcagccgaaaactcggccgaaggtatgaacgtcatcttaatagacgatatttatacgacgggcgccacactgcatcaagccgccgaagtcctgctgacagcgggtaaagcgtcatcggtctcctcttttactttaatcaggagctaaatcattctttttttctgccgatataattgatagaaatataaggcagattaaagaaggaataggagttaatacgatgggtgaattggcgaattgtccaaaatgcaatgctttattttttaaaacgaacctgcagaccgtgtgccaggcatgtattaaagaagaagaaaaagcatttgaaaccgtctataattttttgagaaagcagatcaacagacagtcgacgatgcagcagatcactgaggaaacaggtgtggatgaagagctgatcctcaagtttatcaaacaaaaaaggattcagatcagccagcttccgaatttggcatatccttgcgaaaggtgcggaaatccgatcaggacaggaaaattttgcaagtcctgtcagacagatattgagtcgcaattagaccatatgaaccaaaaaacagccgctgaattcaaagaaaaaaacagtacaaaagacacatactatgcctataataccaaaaacacctgattccctaaactaactgataacgcagtcgataaaagaattagactgcgaacagaaagcgagaggaatcctatgaaaatcaatcagtacggaacacaatccgttaatccataccaaaaaaattacgaaaagcaagccgtacaaaaagaggctgcaaagccgaaggacaaagtggaaatttcttctcatgcaaaagagcttcaaaatgcgtcagatgcggtcactaaaacacgtcaggaaaaaatcgctcagcttaaagcggatatagagagcggaacatataaaatagattcaaacagcatcgctgaaaacatagtgaatttttataaaaagcaataaaaaggagaaagtcaatgtctgcaaagccaattattgatcaactgaagcgactttgcgcactgcatgaacatctgctcacgctgtctgaggagaaaacggaagcgctgaaagcaggtaaaacaaaagagctctccaacatattgactaaagagcaaaagtatattcaggcaatcgggcagactgaggaagaacgaatcaggttaacttctcagtttctcagccgcggtgaggacaatacaattgctgcatgcatctccagaacttcaggcagtgaaaaacaggagcttgaagggttatttcactctctgtctgcgcttcttgaccgtctgaaagaagtgaatgagatgaacaaacagctcacgattcaggctttacaattcatctccggggcattcgatatgatcatgccgggtgaaaaagagaatatgaattataaagagccgcaagcggcgcgcaagcctgtcagccgtttgacattattcgattcaaaagcttagaacggaggattttcaatgccatcgacttttatggggctcgaaacagcaaggcgtgcattgagtgcgcagcagactgcattgagcacagtttcaaataacgttgcaaatgcaaatacagaaggatatacgaggcagcgcgtcacattacaatcgacgagcccttatcccgcagtatcaaaaaacagtgatctgacggccggccaaatcggaacaggagtaaaagccggttcagttgagcgcgtcagagacagttttttagactatcagtacagaacggaaaatacaaaattagggtactatacagcccgttccaattcattgtcgcaaatggaaggcgtcatgaaagagcttgacaataacggattaaacggatcgctcagttcattttggaatgcccttcaggatctggcgacgaatccggaaaatacgggagcgcgctcagttttgcaggagcaggggaaatctcttgccgaaagttttaactatatatctacctctttgactaacattcagggtgatattaaaaagaacctggataacacagctgatcaggtcaattccattctcaatcagctgaatgaccttaacaatcaaatagcggcagttgagccgagcggtatgctccctaatgatttgtatgaccaaagagacagattgattgatcaattatcttctatggcaaatataaaagtttcatataataagtcgggcggacatgccttggcgactgctgagggcacggttaacgtcgaattgctgaacgggaacaacaattctctcggaacgctgctcgacggtaacacaaaaacagtttcagaaatgaaaatcaactacgacaaggacagcggactcgtgtcgagtgtgtcagtcggcagcagtacggtcaatgcggatgcatttaccggaaaaggctcacttttaggtcttattgaatcatacggctatatgtcaaacggagaagaaaaagggctttatcctgaaatgctgacggctcttgacaatatggcgctatcctttgctgacgcgtttaatgcagttcatgaaaaagggaagacctatacaggcgaacagggtgcagcattttttgatttcagcggtgatgaagcggtgccggcaaaaggtgcggcagcgaaaataaaagtcagtgacaaaatccttgcgtctactgataatatcgcagcgtcgttaaacggagaaaaaagtgacggcacaaacgcgacaaatcttgcagccgtacagaacagcaagctgactattaacggtgaaaccactacaattaatgacttttatgaatcccttatcggaaagctgggcgttaattcacaaaaagcggctaatcttatgaacaactctgaaagcaacaccctttcagccgatgaacggagacaatcagtcagtgcagtgtctttagatgaagaaatgacaaatatgattcagtttcagcacgcttataatgcggctgcgcggatcataacgatgcaggatgaaatattcgataaaattattaacggtatgggcaccggaggaagataggagataagtaaatgagagtaactcaagggatgatcgcaaaaaattctcttcgatttatcggctcaagttatgacaagctcgatcggcttcagcagcaagtgtctacggggaaaaaaatcacgaaagcttctgatgatccggtcgtcgcaatgaagggaatgcagtaccgtactcagcttgcgcaggtaaaccagtaccaacggaatgtttcgcaaggttttacatggctggaaaactcggaatcaagcgtaaactcggaaacggatattatggggaaaatccgggacttgatggttcaggcgaaaagtgattcgaacggtgaaacagaattgaaagcaatcggtacagaaatcggccagctgaaaaagcagctcgtttctgtcgcgaatactcaggtaaacggacgttatctgtttaacggaacgaattcagatgtcccgccgatcactgaaaatgccgacggcacatatacgtacaactatgagaattataccggtgcttcggatgttaacatcaacatctcaaacggagcagtgctgaaagtgaattctgatccaaactcagctttcggaggcgtcgcacaaaatggagataatgtatttgaatttctcaactccttagaagcttctttaagcaaaggcacgctgtccgaagcagattcaaatcaaattctgtcagatatcgacggttttactgacaaaatgaatgctgaaaaatccaatatcggcgcacgcacaaaccggttggaactcattcagacaagattggaatcacaagcggcaaccgctgaaaaagtattgtcggataatgaggatgtagaaatggaagatgtaattgttgattatttatctcaacagacggttcatagagcagcgctgtcagtgaatgcgaatatcattcagccgtcactgatcgacttcctgaaataatataactatcgtcttcaatatataaaaaaagcgactcacaacagggagatcgctttttttactaaaatactataaacaggagggatctctgtgcagatgccgagattgattattgacagtgtgcctgctaaaatcggtataacctttcaaaaggaagaaatcgagatggaacagccgcccgctgacctggaaatcgagcagccgccggcagagctgaacatcgaaagcacgccggccaaactgacgattgaccagacgagggcgtgggagaacttgaatctcaaatcatttgaaaagctgaacgctgaagccgctcaaaaaggtgcggaagcctgcagcgagtttatcgcaaaaacagtcagggaagggaaggaaatggcggctatcgaaaagaaaacgggcaatgtgatggcccggcaggcagcagatgtcagtccgcccgatccattcggcgaattcagcgactttctgcctgcgcagtttctcgtcgacattgactgcattccttcaaagcttacgattgatattgaagcccgcaaaccttcaattgaagcagctgtcaataaacctgtatggaattatacgccggggaaagttcagattgatatgatgcaagaccctaaggtgacgatttcggttgatgatggcaacgcagaataaaagatgaaagtggtaaaggattgtgaaggatgataattaaaacaaaatatcacggagaaatcagaatagatgaagggcagattatctcatttgaaaacggcctgccgggatttaatgacgagactcaatttgttgttcttcctttgtcggaagattcaccgtttttggcgctgcagtctgtgaaacaggagcacatcgcctttattgtcgccagtccgtttattttctttaaagggtacgaatttgacattgaccaagcgacgcttgagcttttgcatattgaagatatagaggacgtcgaagtgatggcgattttaacgctggaagagccttttgaaaacacgaccgccaatttaaaagcgccgattatcgtcaataaaaaggaaatgaaggcgaaacaaatcattttacatgatgcttcctatgaaacaaaacatctgataggaggaggatcatgctagttctctcaagaaaagtgaatgagtccattcagatcgggccggatattgaaataaaggtgatcgctatcgaaggagaacaagtgaagctgggaattgaagcgcctcagcacgtagatattcaccggaaagaaatctacttgtcgatcctggaagagaacaacagagccgtatcttttaatactgatttattacttaacttatcctcacaaaaaaagtgaggatttttttattttcaatataaacaatggaagcggccgtccgatatatatattgtagccaatgagaggaaaaattttcttcagaaatgacgctgcgcaaatgcacaaggacgtgcgaaaaacaattcagggaggaaatacaaaatgagaatcaaccacaatatcgcggctcttaacactagccgtcagctgaatgcaggttcaaactctgctgcaaaaaacatggaaaaattatcttcaggtcttcgcatcaaccgcgctggtgatgacgctgcgggtcttgcgatctctgaaaaaatgcgttctcaaatccgcggtttagacatggcgtctaaaaacgctcaagacggaatctctcttatccaaacatctgagggtgcattgaacgaaactcacagcattcttcagcgtatgagcgagcttgctacacaagcagctaacgatacaaacacagattctgaccgttctgagcttcaaaaagagatggaccaattagcgtctgaagtaacaagaatctctactgacactgagttcaacacgaagaaacttcttgacggaactgcgcaaaacctgacgttccaaatcggagctaacgaaggccaaacaatgagcctgtctatcaataaaatggactctgaaagcctgaaagttggtacgacttatacagtatccaatgatcaaaatacattgacatcaactgacggaaaaagcactgctacttgggcggatgaagtaacagatccagatggtaaggttacaaaagcagccggctattatgatactgacggtaaagttattgcatctgaaaaattagctgcagattctaaagtaacaaaaggtatcgacatctcttcttcagctaaagctgcgtcttcagctcttacaacaatcaaaacagctatcgacacagtatctagcgagcgcgctaaacttggtgcggttcaaaaccgtttagagcacacaatcaacaaccttggtacttcttctgagaacctgacttctgctgaatcacgtatccgtgacgtagacatggcttctgagatgatggagtacacgaaaaacaacatccttactcaggcttctcaagctatgcttgcgcaagctaaccaacagcctcagcaagttcttcaattgcttaaaggttaatgacggaaagatcctggttctccagggtcttttttttatttcttcagctaactcctccttcagcaagccaaagaaccctattgacaaaatgaaacattatattttgcagttaaattattgaaaaccttttaatatgaccgatataagaataagatcatacatttatggagctgtgatatgataaacagtcggaaactcactgttgtcatagagccgtctacgactaaacgccgaaaaggagagggtacatatggtcacaagaatcacaggccttaattccggtcttgatgtagattctctggtgaaaaaaatgatggatgccgaaaagcagccgcttaataaattaaaccagcaaaagcagacgcttgaatggaagcgcgatgcttatcgggaaatgaatacccagattgccgacatgtattctactacatttaataatatgctgatgtccacaaactggaataaaaaaacagtaacaagttcggattccagtgtcagcgcggtggccgtcagtgccgaacagaatatttcaacgagcatgtctgtacagcagctggctacgccgacgacttataaatcatcaggggccatcaatttcacttcgggtcaaagccaaacattgaaattcaatgtcacaaatccgggggaaacgaagccgactgaggtaaacgtcacgatcgccgcaaccgatacgattgacgatgtcatttctaaactgaacagctcgggtctcggagtgacggctttaaaagagaaaatctctaacggctcggattatgtggacacgattgcgttcacttccaataaaacgggggaagggtttaccctttcagcaggtgatgacgcgaccaaaagctttctgaaagatcagctcggttttgccgttgatgatgcaacaaatgcactgacggccaatgccgaagggaaaaacgcgaagtttacgttcaacgggcttgaaatgacaaaaacgtcaaataactttacgatcaacggcatcaaatacacgctgaacagcgtgacggacagcaacaaaacggttacgattaacagcacgactgatacggacggcatttttaacaacattaaagatttcgttgataaatacaatacgttaattaaaagcgcaaatgagaaggtgacagaatcaaaataccgtgattataagccgctaaccgatgaacaaagagaagcaatgaccgataagcagattgagcagtgggaggcaaaagccaaaagcggtttattacggagcgacagcacgctgcagaacggtttggcggagatgcggcttgatctgtactcaacggttacgattgacgggaaaaaatatcagcttgccgatttcggaattgagacgtctgatagttatacggatcaaggaaagcttgtcattaaagacgaagcgaaactgaaacagaaaattaccgagaatcctgctctcgtggctaaactgtttaatgcagacagccctgatacagcgaaaaccaaaaacccggaggaacaggggattgcccggagattaaaagacacattaaacaaaatgcagattcaaatttcaaaacaggcgggtacggaaagctcggtatcaaccagctttgccatcggaaaaagcctggatgaaatagaaacaaatatttccaatatgaaaacgaagctggatgacatcgagacgagatattataaaaagttcagcgcactggatacggcattggagaaattgaacagccaatcttcatatctcacgtcaatgttaggatcttcaacttcataaccttgggggttttataaaaatggcaataaataatccttttgctgcttaccagcagacatccgtctttacagccgctccggaagagctgacccttatgctttataacggctgcctgcgattcattaagctggcaaggcaggcgatgaagcaaaacaaccttgaagccaaaaatgaaaatatcgtaaaggcgcaaaacatcattcaagagctcagcatcacgttaaaccgggagattgagatttccgagcagatgtcatccatttatgattacatccgccgccggctgatcgacgcgaacgtgcagaataacggagagtttttagatgaagcggaaaagctcgttactgaatttcgcgacacgtggaagcaggccatgcagagtgaacggaaaaacagccatggcgcgggcggccttgcctgatgaacagcaatgtcttttctttgtataacgaaacgaagaacatgtacgccgcactgaaggacgccccggaaagcgacggtctcatcagcagcgttacggcatttacggagaaaagggaggagatgcttgcgggcataaagccgcctttttccgaagaagaaaaaacgctgcttcagcaggtggccgcgatggaccgtctgattaccggcgaagtgaaacggattcaggatggtatccgaaatgaaataaaaacgcttaagaaaaaacgaatctaccataatacgtatttcaatccgtatcagcaaacgacaagtgacggccgttattacgacaaacgcaaataggtgagtgttttgagaagtttgaacgattaccatttggtgtcagcctattaccagcttctttttacgattgatgaggggctttgctacctgttggacacgcaggatgatttttttaagacggagggcgagcggatttacaacgatttgattcaggctttttttcatctcgattcctctcatgcgcttctgctgtctatcattgagtgccgatgcgtggagacggcgatccgctcatttgacgagatctttcaggatttcagcatgttaaatgattatgatttcccgtccgccccttttcaggagtttttaaaaaccatctttctgccgcattataagctatggatggagcagacgcacgactgtatcaaaccgtatgttcttcactagacctgctgcaagcggcaggtcttttgcctgcgtcctttgcatatacttataatcctgccggaagctgccggataaaaccgacaccattcgtcatcgttcaccgaatttacacattattttaacgtttcagcagggatcagaaggggtaaaagagaaatagttacatatccttagataaagggaggcgttctttgatgaactacaatatcagaggagaaaacattgaggttacacctgcgttaaaggatcatgtggagagaaaaatcggcaagctggaacgatatttcgagcagagcgtcaatgccgatgtgaacgtcaacttaaaattctataacgataaggaatccaaagttgaagtcaccattccgatgactgatctggcgcttcgttctgaagtgcataacgaggatatgtacaatgcaattgatctcgcaacaaacaagctggaacgtcaaatccgaaagcataaaacaaaagtcaaccgaaaattccgcgagcagggtcttccgaaacattatttcgagaacggcagcgctgctgatacgggcgtagcggttcaggacgaaattgaagatgacagcccggaaattgtccgtcaaaagcgttttaatttaaaaccgatggataatgaagaagcgattctccaaatgaatatgctcggacataatttcttcgtattcaccaacgcggagacgaatctcacaaatgtcgtttaccgcagaaatgacggcaaatacggattaattgaaccgactgaataaacccacccagccttccgtgaacgcgcggaaggtttttctctatctttatctgcaaattctttggaaatagcaaaaggtatgttatgataatgagaggtatacatggacagaaaattatcatttattccatgcaaaatctgcatgtgaacatagaggagcgttatagatgcttgggattttaaataaaatgtttgatccgaccaaacgtgcgctgaacaaatacgaaaaaatagcaaatgacattgatgccgtaagaggagattatgaaaatctttctgacgaggcgcttaaaaataaaacggcagaatttaaagagcggcttgaaaaaggagaaacgacggatgaccttcttgtcgaagcgtttgccgtcgttcgtgaagcttcccgccgcgtaaccggcatgttcccgtttaaagtgcagctgatggggggcatcgcccttcatgaggggaacatttccgaaatgaaaacaggggaagggaaaacgctgacgtctacgcttcccgtgtatttaaatgccttgacgggaaaaggcgttcacgtcgtaacggtcaacgaatatctggcaagccgtgatgcccagcaaatgggagaaatctttgcgtttctcgggcttacagtcggcctgaacctgaattcaatgtcaaaagacgaaaaacgcgaagcttacgcagccgatatcacgtattcaacgaacaatgaactcggctttgattatttgcgtgacaacatggtgctctataaagaacaaatggtgcagcgcccgcttcattttgccgttattgatgaagtcgattcaattttagtcgatgaagcgagaacgccattgattatttccggacaagctcagaagtccacaaaactgtacgtgcaggcaaatgcgtttgtccgcacgctcaagaaagatcaggattatacgtatgacgtcaaaacgaaaggcgttcagctgacggaagaaggaatgacgaaggctgaaaaaacgttcggcatcgacaacctgtttgacgtcaaaaacgtggccttgaaccaccatatcaaccaggctttaaaagcccatgcggcgatgcagaaagacgtggattatgttgttgaggacggccaggtcgtcatcgttgattccttcaccggccgtctgatgaaaggacgccgctacagcgaaggtcttcaccaggcgattgaggcgaaagagggcctggagattcaaaatgaaagtatgacattggcgacgattacgttccaaaactatttccgtatgtacgagaagctggccggtatgaccggtaccgcaaaaacggaagaggaagaattccgcaatatttataacatgcaggttgtatccatcccgaccaaccagccggtcatccgtgacgaccgtccggacttgatctaccgctcaatggaagggaaattcaaggcggtggcggaggatgtcgcccagcgctacatgaccggacagccggttcttgtcggtacggttgccgttgaaacgtctgaattgatttctaaacttctgaagaataaagggattccgcaccaggtactgaatgccaaaaaccatgagcgtgaagctcagattattgaagaagcgggacaaaaaggcgctgtcacgattgcgaccaacatggcgggacgcggaaccgacattaaactcggcgaaggcgtaaaagagcttggcggtcttgcggtcgtcggtacggaacgccacgaatcccgccggattgacaatcagctccgcggacgttcaggacgtcagggagacccgggcatcacacaattttatctttcaatggaagatgaattgatgcgccgtttcggagctgaacggacgatggcgatgcttgaccggttcggtatggatgactccacgccgattcagagcaaaatggtgtcacgcgccgtggaatcatctcaaaaacgtgtcgaaggaaacaacttcgattcacgtaaacagcttcttcaatatgacgacgtgctccgtcagcagcgcgaagtcatttacaagcagcgttttgaagtcattgactctgaaaacctgcgcgacattgtggaaggcatgatcaagtcttctctggagcgtgcgattgccgcttatacgccgaaagaggagcttccggaagaatggaatcttgacggcctcgtggagctggtgaattcaacgtatcttgatgaaggcgcgcttgaaaagagcgatatcttcggaaaagaaccggatgaaatgcatgagatgatcatggaccgcatcatgacaaaatataatgaaaaagaagagaatttcggtacagagcagatgcgtgaatttgaaaaagtcatcgtattgcgtgccgttgattcaaaatggatggatcatattgatgcgatggatcagctgcgtcaagggattcaccttcgcgcttatgcgcagacaaatccgctgcgtgaatatcaaatggaaggcttcgcaatgtttgagcacatgattgagtccattgaggacgaagttgcgaaattcgtcatgaaggccgagattgaaagcaatctggaacgcgaagaagttgttcagggccaaacgacggctcatcagccgcaggacggcgatgaggccaaacaagcgaaaaaagcgccggtccgcaaggttgtggatatcggacgcaacgcgccttgccattgcggaagcggaaaaaaatataaaaattgctgcggccggacagaatagtctcgactgtatgaagcgaacatgaccgggtctgcgtcttatggcgccccggatcttttaatgaggtgaatggaatggaattatcagaaatcagggcagagctcgaaaatatggcttctcgtttagcggacttcagggggtctctttgacctcgaatcaaaggaagcccgcattgcagaattagatgaaaagatggcggaaccggaattctggaatgaccagcagaaggcccaaaccgtcatcaacgaagcgaacggtctgaaagaatacgtgaactcctaccatcagctgagcgagtctcacgaagagctgcaaatgacacatgatcttttaaaagaagaacctgaccaggaccttcagcaagagcttgaaaaagagctgaagtcattaacgaaggaattgaatgaatttgagcttcagctgctgctcagtgaaccatatgacaaaaataacgcgattttagaacttcacccgggcgccggcggtacggaatcccaggactggggttccatgctgctcagaatgtatacccgctgggcggaaagacgcggcttcaaagttgaaacgcttgattatctcccgggagatgaagcaggaattaagtcagtcacactgcttattaaaggccacaatgcatacggctatttaaaagcggaaaaaggcgtacaccgcctcgtgcggatttctccatttgattcatcaggccgccgtcacacgtcattcgtgtcatgtgaagtcatgcctgaattcaatgaagaaatcgacattgatattcgtaccgaagatattaaagttgatacgtaccgggcgagcggtgccggcggacagcacgtcaatacgactgattcagccgttcggatcacccacctgccgacaaatgtagtcgtcacatgccagacggaacgctcccaaatcaaaaaccgcgaccgggcgatgaaaatgctcaaagcgaagctgtatcagcgcagaattgaagaacagcaggcggagcttgacgaaatccgcggcgaacagaaagaaatcggctggggcagccaaatccgctcgtacgtcttccatccgtactccatggtgaaagaccaccgcaccaatacggaaatggggaacgtgcaggcggttatggacggagatatcgatatcttcattgacgcctatttacgttctaaactgtcgtaatccgggaacacacctgcctttggcaaggtgtgtttttttatccgttctctttttccatttttcacaacagcgctttagcaaattaatacggtatttggctgttatttacttctaagccgggaagacttaaaatgctatcgagagaaaatcggagaacggaggattttgcatggatgtgaatcacaataagccgctccgtctgatcaaagattacatatatatcatgatcggcgcggcgattacgggggtcgtgtttaacgtatttttgctgccgaaccgtatagcagcggggggagtaagcgggatcagcaccattttagaaacgtttggttttgaaccggcttatgtgcagtggattattaacatccctttgtttatcgccggagtgatcattctcggcgggaagttcggaatgaagacactggtcggttccatcgttctgccgcttgccgtctttttaacaagagatctgcctgccgcgacgacccatgaactgctggcggcgattttcggaggcgtcgggatcggaacgggaatcggcatcgtgtatctcggcaaaggctccacggggggaacggctctggcggcgcagatcattcacaaatacacggggctgtcgctgggaacgtgccttgccatcatggacggattaattgtgctgagcgcgatgctcgttttcggagtggagcagggactgtatgcgatgctcggggtatttatttcaagcaaaacgattgatgtcgtgcaggtcgggttcaaccgctccaaaatggctttaatcattacgcagcatgaagaagccgtcagatcagctgtgtttaaagaaatcgacaggggtgtgacgaagatttccgcagtcggcgggtatacggaacatgaccggccgatcttaatgtgtgtcgtcggtcagaccgaattcacaaaactgaaacaaatcgtcaaacaaattgatgagtcagcctttgtcattgtcgcagacgcaagcgaggtgctcggcgagggtttcaaacgcgcgtaaacgaggttataatagcgaaggggtgcatcttacatatgaaatcaaaatgggcgctgctggcgctggttctgaccatgtccgtcctgctggcggcatgcggcggatccaatgaatcgaaaaaagaaagctctgacagctcaggcggatcaaaagcatctgcgtcagcgggtgaagaactttatcagcaaagctgtatcggctgtcacggtaaagacctagaaggcggcggaggtccgaatttacaggaagtcggcgggaagtatgatgaagctaaaattgaaagcatcattaaaaacggacgcggcaatatgccgagccatcttgtaaatgatgaggaagccgtgaagatcgcaaaatggctgtcacagaaaaaataacagaaaaaccttgcctgttataggggcaaggttttttctcggtctgggaatgaaaagaaactgtaatagtaatatgtctaaatttgacgtataatgaagtgtactgaggaaaaggaactttcagatttttcatctgtttcctgacgaatcggccataaaccgctgtatgtttgcgaactctatggctgcaagacataaataaaagattaggtgatttcatgatagagatgaaagaagtatataaatcctatccgaacggtgtaaaagcgattaacgggctgtcagtcatgattcatcccggggaatttgtatatgtcgtaggaccgagcggagccggtaaatctacttttattaaaatgatttacagagaagaaaaaccgacaaaagggcaaatattgattaatcataaagatctcgcggctgtgaaagaaaaagagattcctttcgtgcggcgtaaaataggtgttgttttccaggatttcaaactccttcctaaattgacggtatttgaaaacgtagcgtttgcgcttgaggttatcggagagcagcagtcagtcattaaaaaacgcgtgctcgaagtgctcgatcttgtgcagctgaagcataaagcgcggcagtttcccgaccagctttccggaggagaacagcagcgtgtttccatcgcaagatccatcgtcaacaatcctgacgtcgtgatagctgacgaaccgacgggcaaccttgatccggtaacatcatgggaagtgatgaagacgctggaagagattaataaccgcggaacgaccgtcgtgatggcgacacacaataaagaaatagtaaacaccatgaagaaacgggtcatcgcgatcgaagacggaattattgtgcgtgatgagtcaagaggggagtatggttcttatgattaaaattctcgggcgccatttgcgtgagagttttaaatctctcggaagaaacacgtggatgacatttgcatccatcagtgccgttaccgttacattgattttggtcggcgtgtttttagtcattatgctgaatttaaacaacatggctaaaaatgctgaaaaagaagtggaaattaaagtattaatcgatctgacgtcaaataagaaaacgcaggatacgctgcagaatgagataaaagacatttcaggaatccaaagcgtagagttttcatctaaagataaagagcttgatcaattggtcaaaagcttcggcgacagcggaaaggccatgaaaatgcaagatcaggaaaacccgctgaacaacgcgtttatcgtcaaaacgacagatccgcatgatacgccgaaagttgcgaaaaaaattgagaagcttgatcatgtgtataaagtgacatacgggaaagaagaagtcagccgtctgtttaagatcgtcggggtgtcacgcaacatcgggattgcgttaatcatcggccttctgttcacggcgatgttcttaatttcgaatacgattaaaatcacgattttcgccagaagaaaagagattgaaatcatgaagcttgtcggcgcgacaaactggtttatccgctggccgttcttcctggaagggctgctgctgggggtattcggttctgtcataccgatcgctctcgtgctgagtacgtaccagtcgatggtcgcttgggtggccccgaaagttcagggatcatttgtttcacttctgccgtacagtccgtttgtgtttcaagtatcacttgtgctcattctgatcggcgcggtgatcggagtatggggaagtctgacttccatccggaaattccttcgtgtataaataaaaaagccagtctgatacagactggctttttttaatggtttcgttactgaatgacgggcagggccggtgatccgggctttaatgtaaagtcataagacgattcgtcacggtacatcgggtccgcataaatggaatccgaatcgtttgccgttccttttcggtacgctgtgaatgaatcatattctctgttcttccaattccagatgccgtcttttccctcttctttgtgatagacgttatgattaacggtattttcttcgtttttcgtaaaatcatttgcgataaaaatccgtgaatcgcttgccgtcatgatgtttttttcgatcgtgttcccttttgtgccgtactgcaggagcagctggccgccgtcaaggtccttcgtgtcatttcggtacatgatgttgtgagcgatcaccgaattgatggtgccgccgcgtttcgtgtcatagcctccgattgaaataccggtgtatgcattgccgtacaccttgttatccgtaatccggatatctcgtgcgtatttccctttatgctcagaggtggcttcaatcccaaggtcattgttgtaaacggtgtttttcttaatgtccacatgttctgcgccgtcaacgtaaataccgcccgctgaatattcatctccgtaagcgggatttccgtaagaagagttatggctcaccgtattgttttcaatgacgccgtttcgcgcatagtcgttttgcttggacgttccttcgtatccgatcacgtcaatcccgatattgttattgtcccggatggtattgccggcaatcttaaatccgtcgacattcccgttcagcacgaccgcttcgcttgcgccgagcgtcagtttttcaaccgtattatttgtaatgctgacatccttcatggcacctgtgccgtaaaatgcgatgccgtgtgcatttccttcatcagccgtggttttaatgttccggatatggttgccgtcaatgttgatatgactgcttgatccggtgacgcagatccccatggccgtcgcatcttctgatgatacggagagattctcaagcgtaacgccgtgaatggtaatgtactgtttattgcggatttgaattaacggagtttcagaatcgctttttggcgcagatttgccgctgattgagacatgctcattctgatagttccgaaatgtaatcggcttttcggccgtgccgctgtgctttacttcaaacgtttcatcgtacgtcccttcccgaatcaatacggttgttccggcctctgccttttcagccgcatgttttaatgtgcggaacggcttttctttcgttccttcatattggtcgctgcctgcgggagaaacatacaaggcgtccgtctgcgctttctcattggcctctgtttttggccagacaaaggcggtaatgcctgcggccagaaccgccgcggataaaatcgataattttattttcatatcgcattctcctgtatatttaatgaattgcatacaaaatattatacgttacccatatatatgaaacaatctcgctttttcatttttttgttgccgttacatgaattctttgcaatttacacatactatctccaggttttcgttaaaggactaagaggaggtaaacgatgaagcagaaaatgatcgcagtgatagcggccctaagcatgatgtgcggcggagcccatattgccggggcggcacagccgaattcatcagacgcagaaagaacccgggcaatggaaaaaatcgaaaaagcatatgagctgatctcgaacgaatacgtggaaaatgtagataaagaaaagcttcttgaaggagcgattcaggggatgctgtctacattaaacgacccttattccgtttatatggacaagcagaccgctaagcagttttccgattctcttgattcttctttcgaagggatcggcgctgaagtcggtatgaaagacaataaaatcattatcgtatcaccgtttaagcaatctccggcagaaaaagcgggcctcaagccgaatgatgaaatcatcagtataaacggcgtgtcaatgaacgggaaagatataaacgaagccgtgctgaaaatcagaggaaaaaaaggatcgaaggtttctattaaaatacagcgtccgggtactgaaaaacagctgtcattccggattaaaagagcggaaatcccgcttgaaaccgtatttgcttcccgcaaagaatcaggcggtcatcatgtcggctacatcggcatatcgacattttccgagcataccgccgaggacttcgccgcggcgctgaaaaagcttgaaaaacaagggattgacggtctcgtccttgatgtaagggggaatcccggcggctaccttcaaagcgtcgaacaaattttaaagcatttcatcacaaaagacatgccgtatatccaaattgcggagcgtaacggcgataaaaaacaatatttctcaaccttaaaacataagaagccgtatcccgtcaatgtcattacggataaaggaagcgcctccgcttcagaaattcttgcgggcgcgttaaaagaagcgggacattatgacgttgtcggcgacacttctttcggtaaaggaacggttcagcaggccgtgcctatgggagacgggagcaacattaaattgacgctttacaaatggctgacaccgaagggcaattggattcacaaaaaaggcattgctccgacaatcgctgtgagccagccggattattttgcggcgggaccgcttcagctgaaacagccgcttcagcctgatatgaacagcgcggatgtcaagcacgcccaaatcctgctgaaaggcctaggcttcgacccgggcagagcggacggctatttcagcaaaacaatgaaaaaagccgttctggcgtttcaagaccggtacaagcttgataaaacagcggtcattgataaaaagacagcggaaaaaatgaatcagctgatgaatgaaaagaaatctgacgaaaaaaatgatttgcagctgcaaatggcgttaaaatcattatttgtaaaataaatgaaaaggaggcgttttttgcgtctcctgtttcttttgtcattcataaaaagtgaaccaaaagacatataattatgacggttttgacaagatattaaaaaaattttcacatttaaacatttataaaggacaaacattacccgatatttatagagaagagagactttatgccgatttaatatgtattcaaaatgaaacttttgaaagttgcctcagtcagttttagttcttacaataaaagaaggttctaatagagaacagttttagtttggcagctgcatttcagtatcgaaagcagaagtgtttgcggcgcttcagcacggcagctgtaatcacccgtgcttatctggataaaaaaatgggggttcacaattgaagagggcaagtattgtgcgtgaaaaaaaatattatgaattagtggaacaactaaaagacagaacaaaagacgtcacattttcatcaacaaaagcactaagtcttcttatgctgttcagcagatacctggtcaattacacaaatgttgaatgcgttcacgaaatcaatgaagagtgtgcgaagcattatttcacttacttaatgaaaaaccataaacgtttaggaatcaatctgacggatattaagcggtccatgcttctgatcagcggcgtgatcgaggtggaggttgaccactatctgaaagatttctctctctcaaatgtaacgttgtggatgacggaagagagatagacgtttgagatattcaagccaatgattatttggtagaatagaattaaaatgtttggcttgaggcggtgaaagcagtgtctgttcaatggggaattgaacttctgaaaagtatcggtctgttttttttgcacccgatgttctggttttttatcatcataagtctcgcatgcggatatttgcggatcaaacgtgaacgccatacgtttcatacaaagatcgcggatatgtatgacgagcttatctttacatacataaaaggacttataccgggtattcttctctccatattattttttggacttggaatttcgattccattcggtcttctcggcataatcgcggctgtgactgctttgctttcgctgacgttccgtatgaattggctgtcctcagcttatattgtcagcgccggcatgttcattgcgtttatccttcagtatacccacacagtgccgtttgcggatcggtttccgcaggcattcggcgtgaattgggcatcggcggccgtgtttatgggccttttgattatcacggagggagcggctgcctgccgttcagcgcatctgaaaacatctccggcgcttgtcgtcagcagcagaggcctgcccatcggccgacaattggcgaatcgcgcatggctgcttccgcttttcttattggtgccgggcagcgggcttgagtcacacctttcttggtggcctgtctttaccgtaccgggcggctctttccatttgatctggattccttatatcgccggcttcggacagcgtgtgcaggggtcacttccggaagtcagcataaggataacggcgaaacgtgtcatgattctcggggttatcgtgaccgcattcggggcagctgccctttggtggactccgcttgccggagctgccgcttgtattgcggtgctcggacgcctgtttttatcattgagacagcggctgaacgataacgcggctccgttttatttctctaagcgggatcagggcttaatggtgctcggcatcattccgaatacacccgcggacgatcttgagctgaagatcggtgagattattacgaaagtaaacggcatccccgtgaaacatgtatcggatttttatgaagcacttcaaaaaaaccgcgcatttgtaaaaatggagatcatcggcctgaacggtgagatccgttttgatcagcgcgcgtcctatgaaggcgaacatcatgaattaggtattttattcgtgcaggatgaacacgagcacgaagaaatgacagcattataatgtgatttttcataattattcggaatagtttcaagaactcctaaactagatttcaaaatcagttagaaagtaaaacagctaagaaaattatattttcttagctgttttattttgaaataataaaaaaataaatgaaggagaggtatggcttattggaaaggttattgctaactccaaaacctttagaagatgaatctttagcaggatatatattaagaataactgattataatggttatgttggatagggggagtacattataaaaaagcttttacttaagagattaccgttgatttcacttggagttatagcttacatactgacaaaatacgcgcagaaccatcaggattgggcggaaaaatacagtaggtctgtatatccgttattgtcaaaaatagtaggatttgtaccttcttgggtcaagttttctgttagtgaatggctcgtcgtgttggttgtgttactttttctattttatatcgtttattatgtgcgcaaggttatcatgagtaaaggtgtacgtaggatggtagtttatcgtggtgctctaggaatagttacgatctgtagcgtgatatatttttgttatactattttgggtggaataaactattacagatattcttttttgtcttataccgaatataaagaagagaactacagcaaggaggaactggtcaaattgagtaagtcgcttgccgttgaaatggaattggcaagggaaaagttagcggacactgatcttttggctcaagtaccagaggtttttgattattatgcacaacacgcagtgttctcgatgcaaatgttatcaaaggaatatcctattttggagcattctttatactcaacaccaaaaccagttgtgatgtcaaagctaatgtcgcatgcagggataaatggcatctttgtcccttttacttatgaatccaatatcaatgttaatgtgcccgttttcttggtgcctgctactatggcacatgaattggcacatcagagtggtttcatgcatgaggatgaggcaaattttatagcatatctggcatgtaagcagcaggatgatccaatgatactttacagtggtttttttctagcatttgtttattctatatctgagctaaagaaagtggatccagatcaggcgtctgatataatgtccagtctgtccaaggcggtgcagcatgatatagaacaaaatgagcagtaccgggataagtatgagggtgttatttcaagtatttcaagaaatgtaaatgatgtatatctgaaggcaaataatcagacagacggtttgaatagctatagtgatatggtgaatttgttgctggcagagcagcgagatagagaagtacaattaaatgtatcttgaatacttataggtttatatagtaatgatagtgggctcaagttgaacataggagtgagtgaaataaataaaataaaagacggcggccgggctttttacggccggattacgatgtcagcgccgaacttgatcggaactctcagccatttacattccccttttctcttgtaaatcaaaagattcttatagagcaaacggcattgcggtgacactttgagagagaaaatgaagaaggaaaactagaaaaggttccggaaagctgatgcttacggaacctttttcgttatgccgaatggctttttttcgtctgaacggtttccccggacttaattccaagcgatacgaacaagccgatcacagaaactccgatcaatatgataaacagaatatgaaacccggagattaaaccgatcagtgctgaagaaataatgcttccgaaataacggaaggtggagaaaatcccggatgcgatgccggacatgcccggttctaccgtcgcaagagaagatacctgcatgctcgtcagccccgcacctgacgcgatgcctcctacaataagcgatgccataagaaacggaacggaatgggaataaaccaaaagcagaaataagagattggctgcggccatcagcccgaaggacagaaaaatcattcttcgcgcgccccatttctgatgcagctgagctccgccccagttgctggcggacatgaaaacagaaaagactgacagcgccatgccgctgtgcgacgtgttcatgctgaagtggccggtcataaagagcggcataatcaataacacggcgtacatcattaaattgcttaacagaaccgacagattggcgctcgtaaaggtcgtgtttttaaacaggtcaaaatcaataatcggatgtttcgtgcgcagttcccgcctgaaaaatagcggaaccaatacgagaatgagcagcgcgtacacccaatagcccaaagagctttcatttttcgtcagaagaataatagatacaatgcttccggcaagcaaaacggacccgatgatatcaagcggagcgtcagacgtttcttctttatatttaggaaacatcattaatgccgtcacgagtgcgatcgcaagaaacggaatgttgacccaaaagatcgaatgccagctgaagctctcaattaatagagagccgataaacggaccgagagctgcgcccagcccggcgccgaggccgaaaaagccgaatactttcggaagccgtttttcagacacgacatggcggatgatggcgatgctgtttggcgtaagcaaagcgccgccggcagcctgaagcgcccggaagaaaatcaataagaaaagacttggcgagagggcgcaccccaatgatgcgatgagaaaaaggccgacgccccataaatacatttttttgtttccgtacatatcaccgagtttgccggcaatgggctgtgtcacggccatcacgattaaatacacggtcactacccatgtgatgctggcaattgattcgctgaatgagcgggaaatggatgaaagggcgactgcgatcatcgtagaattgatgggaacgagtatggctcccagcaaaagcgaaacgatcagcgcccattctttctttgaacccatccttcatcctccttggagccggaaaatgaccggccggtaatgcctttcatgaaaatctcagtgctgtgtttcagcatcgtttcctcagagagagtaatgactcttttccccagctgcagccggtgtataaaataaccgaaaatcatcgtcataaagacgtctgcattagcttcttcgctgccggggcttatcatatttttctttgtcagctccttaaagtaaacgattaaatgctttttcacggattgcggatatacgacaatatcctgcaggacgtcttcgaatagttccggttcgcgcaggcagatgcggaacacttcttttttttgttccaattgctgcagaagggtcgtggcgaaatgaagaagatcctcatacagatcgccttccgccttggtgatcatgctttccggaaccggcgcctgctgttcaatcatggctttcattaatccttgtttgtttttaaaattacggaaaatcgttgcttcgcttacttttgctttttctgcgatttcctttgttgtcgctgcgcggtatcctttttggatgatcagattcatcgcggcgtcaataattctcttgttcgtcgttctcaacatgtttcacctcgcgtaaatactggcaggacaagtatacacccgccctgcccgtcaataaagagggaaacctagcatgaagcgcgtttgacaattgtaatcttgccgtttgtcccgtctaccgtgacgatatctccgtcgttgagcctgtcagtcgcggcacgtgtgccgagaacggccgggagcccgtattctctcgcgatgatcgccgcatgtgacaggatgccgcccgtgtccgtaatgacggcctttgcatcctggaacagactggtccaaagcggtgtcgtcattttgcagacaagcacgtctcctgttgaaaaacgggaaaattcacttgcgtcacgaatgactttcaccggtccgcttgcgattccgcttgacgctgcaagtccgtaaatttgatgttcagtgtttttttcatcttctgtgatggagccggtaatctgttcagccgttttcagctgttccgaagtcggagtcccgagataagcgggggcttcaagcaattgatattgcttgaagagccgttttcgttcagcggctttttcctgcatcggaaccggcgacgccagcgctttctcgacttcatcgctgtataagtaccacatatcctcccgatcatcaattacgccttgtttttgaagcagctcgccgattttcagaaggcaaaggcgcgctttggcgtccagcatcgcatcaatataaaaatggtgatcatctttgatgacggatgaagacaatgtccactgataatagcggtcaaacgtctcccggaagccgtcatcttcaattctatccataaagtcggcgtagagctgttttcgtttttctatcgttttatgaaactcactgtcaaaatcgtatccgtttcggacatagttctgaatgttggccaaagcgaaataagggttttccgcccaagtttcttcaatgagatcatgacttttcacggatctccagccgtattcctgtaaaaattcgccgacttgttcaagaaagcgttttccctcatttgattgcagaagcgtctgatgcagctcatcggcatgagaaaccgtaaagacgcgccgcagctcagggctgtcttttacttgtccggaaagcagccagagctgtctgtcggtctccaatgacttattcatgacgccggccagcatttcatacagaagggaggtgttttctttctcaacctgtccgtacatagattccagtatcatgtttaacgcaacctgcggaaagacaatattgaaatgttctgcgtatccttttaaatagaagtcttgcaggtttcggaacgcatcaatggcagtctccggcgtatggtctgtatgcgccagttcgtccagcttttgataaaaaggcagaaaggtttcctgaataatattgtacatgcggtcagccaagacggggaaaagcgcttctaactgttctgcgggcagcttgtcgtccgtcttatgctgtctggaaaaaacatggccctgatgaagtttgacacgctcaatctcgatgcccatcacagggaaggccttcgtgctctctttgagaccgtattccaaagccggcacaatgagtgaagcgaataacgggctgacgggaccttctatattggactccatattgagccaaaaatctttctgatcccggggcgtcatgataaattcccgttcttcgtctgccgctttctgatcctgcgcgatcgttgtaatcggtctggcctgaagcagatagagcttattttcggcaaatccgaattcgagatccacgggataaccgtacagttcctccgtctttatcgtcagcatggcaagctctttgacgctctcgtcatcaaggcagaagcggtttctcatgtcagcggacgtctctttttccgtcacgccttcgtctttagagacgatatacatttcttttaagccgatttctttttcaatctgaaatgtgtctttattgacgataaatgtgtcgggcgtcacgctgccggagacgattgcttctccgaggccgtagctcgcgctgatcatcagttctccgtcatcatgtgtgacggggttgcggctgaaaatgactcctgaaacctcggaattgatcaaaccttgcacgacaacgcccattaacggttctgcggtgtcattgttcattttctctttataaccgctgacccgcgccgagaagaaggaagcccagcactctttcacttttccgagaaactcttcttcagttttgatatttaaataggtttcgtactgtcccgcgaaagaagcgccttcaagatcttcggacgcggaggaggaacgtacggcgacagaggcgtatgattctctcaattcataaaacgatgcggtcagctcctcccgaagctcttttgaaaacgtgccgttcataatggcgcgctccagctgttcctgatctgcttgaagcccgttgtcttccataaaacgtgtcagggcattcgtctgaatgataaaaccgccgggaacgggcagcccgtttttcgtcagtttaatcaggttcattccttttgctcctgcagagcggctcgattcttccgctttttgaaatcgcactgaatacatgcggtatgaccccctttttttcttcatccaagaaaatgatagtaaacactatcattacattgtaaagagggaggaagaaactgtcaaagatacaaagacctaaaccttctcatcctttcggctgaagaaaggtaattcgattcatctggttaatggttcaatggatttatattcacattttctttgacagatgattgaagactgccgaaaaagggtattgtgatagcaggggaacgattgtccgattcttcattttttactataatcagatgagatgaagaattcccgaggagggtttttgtgattacaaaagccgtttttgcattatgtttcccttttatgctggtcgtcctttttacgcgcgtcacgtttaaccactatgtggcgatcgctctcacagccgcactgcttttcgcatcctatttaaagggttacaccgaaacgtattttatcgttggattggatgtcgtatcgctggtggccggagggctgtacatggccaaaaaagaagcagacaaaaagaaagacaatgcctgacatggtgaatatgaaatagaatgcctgcttttacgccataaaagcaggttttttatacaaaaattgacttggtaaaaataaaccatcgaactttagttcgtatttttagtgattttgcccgtcattgtgttactatatcaataggaagatttcgtaaagaaacggaggcttttttgtgaaagatcgttttgagttagtctcgaaatatcagccccagggagatcagccgcaagcgattgagaagcttgtcaaaggcatacaggaaggcagaaaacaccagactctcctgggtgcgacagggacgggcaaaacctttaccgtgtccaatctgattaaagaagtgaacaaaccgacactggtcattgcccataacaaaacccttgccggacagctgtacagcgagtttaaggagtttttcccgaacaacgctgtcgagtattttgtcagctattacgattactatcagccggaggcgtacgtgcctcaaacggatacttttatagagaaagacgcaagcattaatgatgaaattgataaactgagacattccgcgacatcctctctgtttgaacggagagatgtcattattatcgcgagtgtgtcatgcatatacggcctcggttcgcctgaagaataccgggaaatggtcgtgtcgctcagaccggaaatggagattgagcggaacgagcttctgagaaagcttgtggatatccagtatgcccgcaatgatatcgactttcagcgcgggacgttccgcgtgcgcggagacgttgtggaaatcttcccggcttcccgtgacgaacattgtatcagagtggaatttttcggagacgaaattgagcggatcagagaggtcgacgctttgaccggagaaattctcggcgaccgtgaccatgtcgcgattttcccggcttcccacttcgtcacccgggcggaaaagatggaaaaagcgattctgaatattgaacaggagcttgaggagcgcttgaaagtgatgcgcgaaaacggcaagctccttgaagcgcagcggcttgagcagcggacgaggtatgatcttgaaatgatgcgggaaatgggtttttgctcagggatcgagaactattcaagacatttgacgctccgtcctcctggttctacgccgtatacgctgcttgattattttccggacgattttatgattgtcgttgatgaatcacatgtgacgattccgcaggtgcgcggcatgttcaacggtgaccaggcgagaaaacaggtgcttgtcgatcacgggttccgcctgccgtcagcgcttgacaaccgtccgctccgattcgaggaatttgaaaagcatatgcacaatatcgtgtacgtgtcggcgactccgggaccgtatgaaattgagcatacgccggaaatgatcgagcagatcatcagaccgacgggactcctcgatcccctcattgacgtccgtccgatcgaaggacagattgatgatctgatcggcgagattcaggcgaggattgaacggaatgaacgcgttctcgtgacgactttaacgaaaaaaatgtcagaggatctgaccgattatctcaaagaaatcggcatcaaggtcaattatctgcattccgagattaagacgcttgaacggattgaaatcatccgtgatctccgcctcggaaaacatgatgtgttaatcggcatcaacctgctgagggaagggcttgatattccggaagtgtcacttgtcgccattctcgatgcggataaagaaggcttcctccgttctgaacgttcgctgattcagacgatcggacgggcggccagaaacgcggaaggccgcgtcatcatgtatgccgataaaatcacgaattcgatggaaatcgcgattaatgaaacgaagcgccgccgggaacagcaggagcgctttaacgaaattcacggcattacgccgcaaacgatcaataaggaaatccgcgatgtgatccgcgcgacgcaggccgctgaggataaagaagaatataaaacaaaagccgcgcctaaactggcgaagatgacgaagaaagaacgccagaaagtcgttgagcaaatggagcacgaaatgaaagaagcggccagagcgcttgatttcgagcgggcggcagagcttcgtgatttactgttagagcttaaagcggaaggatgatgaacacatggcaattgaccggatcgaggtgaaaggcgcaagggcgcacaatttaaaaaacattgatgtaacgattccccgggatcagctcgtcgtcgtgacggggctgtccggatcgggaaaatcatcccttgcctttgacaccatttacgcggaaggacagaggcggtatgttgaatcgctttctgcctatgcgcgccaatttttagggcagatggataagccggacgttgatgcgatcgaagggctttctccggcgatcagcattgatcagaaaacgacaagccgcaatccgcggtcaaccgtcggaacggtaacggagatttatgattatctccggctcttatacgcgagagtcgggaagccgcactgcccggagcacggcattgaaattacgtcgcaaacgatcgaacagatggttgaccggattcttgaatatccggagcggacgaagcttcaagtgcttgcgccgatcatctcaggcagaaaaggcgcccatgtcaaagtgcttgaccaaatcagaaagcaaggttacgtaagggtgcggattgacggagaaatggccgagctttccgacgatattgaacttgaaaaaaacaaaaagcattccattgaagtggtcattgaccggattgtcgtcaaggaaggggttgccgcccggctttccgactcactggaaaccgcgctccgcttaggggaaggccgtgtcatgatagatgtcatcggtcaggaagagctgatgttcagcgagcatcacgcctgtccgctgtgcggtttttctatcggggagcttgaaccccggctgttttcgtttaacagcccgttcggcgcctgcccgacttgtgacggtctcggtttgaagctggaagtggaccctgagctcgtcattcccaatcctgaactgtcattaaaggaacacgccatcgcgccgtggacgccgatcagttcacaatattatccgcagctgcttcaggcggtctgccgccattacggcattgatatggagactccggtcaaagacctgccgaagcatcagcttgataaagtgctgtacggcagcggcaatgaacggatctactttaaatacgagaatgatttcggacaagtgcgcgaaaatgaaattgaatttgaaggtgtgctgcgcaatattgagagacggtataaagagacaagctccgattatatccgtgaacagatggagcagtacatgtcacagaagccgtgcccgacgtgcaaaggctaccggctgaagaaagaagcgcttgccgttttggtcaacgggcgccacatcggcaccattaccgagctttccgtcggcgatgcgctggaatttttcaaaaacctgacgctgtctgagaaagatatgcagattgccgatttaattttaagagagattgtggagcgtctcagctttttagataaagtcggtcttgattacctgacgctgagcagggcggcgggaacgctgtcaggcggagaagcccagcgtatcaggcttgcgacgcagatcggctcccgtttgtcaggcgtcctgtacattcttgatgagccgtccatcggccttcaccagcgtgacaatgaccgtctgatcagcgcgctgaaaaacatgagggatctcggcaatacactgattgtcgtggagcatgatgaagatacgatgatggctgccgattacttgatagatatcggcccgggcgccggcattcacggcggccgcgtcatatcggcggggacgcctgaagaagtgatgaatgatgcggattctctgaccggacgttatttgtcaggggctcaattcatcccgatgcctccggagagaagaaagcctgacggccggttcattgaaatcaaaggcgcttcagaaaacaacctgaaaaaagcgaacgccaaattcccgctcggcacttttacggcggtgacaggtgtgtccggttcgggaaaaagcacgcttgtgaatgaaattctgcataaggcgcttgcgcaaaagcttcataaagccaaagcgaaaccgggaagccataaagaaatcaaaggccttgaccatcttgataaggtgatcgacatcgaccaggcgccgatcggccggacaccgagatcaaatccggcaacttacacgggtgtgtttgatgatatccgcgatgtattcgcgcagacaaatgaagcaaaggtgcgcggctataaaaaaggccggttcagttttaatgtaaaaggcgggcgctgtgaggcctgccgcggcgacggcatcatcaaaattgagatgcacttccttcctgacgtgtacgttccgtgtgaagtgtgccacggcaaacgttacaaccgggagacgcttgaggtcacatacaaaggaaaaagcatttccgacgttctggatatgacggtggaagatgctctgtctttctttgaaaatatcccgaaaattaaacgcaagcttcaaacgcttgctgatgtcggacttgggtatgtgacgctcggccagccggcgacgacgctgtcaggcggagaagcgcagcgcgtcaagctagcttccgagctgcataagcgttccaccggccggacgctgtatattctggacgaaccgacaacagggctccacgttgatgatatcgcaaggcttttggttgtgcttcaaagactcgtcgataacggtgataccgttttggtcattgaacacaatctcgatatcattaaaacggcggactacatcgtcgatctgggacctgaaggcggagcgggcggcggcacgatcgtagcctccggaacgcctgaagaagttgtcgaagtgaaagaatcatatacgggccgctatctgaaaccggtaatggaacgcgataaaaaacggatgaaaacattgctggccgaaaaagaaacggcagccacgtaatagatcaataaaaacagcccaaaactcatcggttttgggctgttgttgttacaggctttttttctgttggggaagctgtctgcttaaatgcattaagtcctgcagaatatgggtgctgctgctgtccagcagcacttttatatattggatatcatgggaaatgggaagaggggctgctttgatctgttctaattcagccagcatttcgctgttcattcttttctgttcgcgaattaaatttcgaagactctcttccgttacttgggcgttttcgggatctttctccatttgtatgtcctccttgcatacggtcaggctttgttacatattgtaatcggttcggggaaaagattctatagtgaaatctctgaaaccaaaaattacgtataacgaagcatgtccttagcatgaaaatgaaacccgctcattcgtcatacgtatgtataaggaatggttttttatatcatggcacagggagtgtttttattgaaccgaaatcaagcgattatcgcatcaatctgttatttcagcgtgtttctcgcgccgctcattcttccgattgtggcttactttgtcgtcgatgaaaaagagacgaagcggcatgccatgcgcgctctgatttcccatatcattccgtttgcgggcttgctgattgtgaccgccggtgttgtcggcggattgattacggcccagggggagagtatggtgcccgtttttgttatgataacaggagcagctgtttattttctgatcctcatcggaatggtcatttggaatatcgtgcagggaattaaggtgttacgccaggtgtaagaaaagtcgggggaggagttttgtatgaaacaggagaaagaacggattttaaagcttgtggaagacggcatgctgacggcgcaggaagcactgacgctcattgaaaaactggatcatgaatataaagaaaaagaagatcagatcaccgcattatctgcggaggttcaggaacctgcggaagatttcgaaagcggtgcaaaaggaagccaaaagccgtcgctcggggcgaagctgttcgactggattgattctgccgtcaaaaaagtgaaggaagcggatcttgatctgaatttcggccacgcacacgaagtgcagcatatttttcaatttaaagacagtgaattctcggccattgatatgcagattgcaaacggcagcgtcaatatcgtgccgtgggcggatgaagatatcagagcggagtgccaggcgaaagtgtaccgggcggacagtcaggaggcggcgcgcaccgcatttcttcagcatattgagtgtgaagtgaagggcaataagttttttgtccgcacggaaaagaaaacgatgaaaaccaatgttacgctttatgttcctcagaaagagtacgataagataagagtgaagctgtttaacggaccgatcagaggggaacatttacatgtaaaagaattctcggcgaaaacgacaaacggcgttctgtcattctctcatttgacggctgagaaagcgtcggcggaaacggctaacggacaaatcaagctggccggacatcaatgcggcgcgattgaagcggaaacgatcaacggcttgattgatttgcgcggatcgagtgaatccattgacgttcaaagctttaacggcaatatcatgcttaccgtgacagcgccgcactgccgctccatctacacgaaaacgacgaccggaaacgtggagatcgccctgcctgatgattcggcggtgaaagcggagctcaaaagcaatctcggctctctcagccatgagctgattgatgcggaaattttaaaggaaaagaatgataccattcaaaaagaactgatgctggcatcaaatcaaggccatgatcagcatctctcgattttctcagaatcgttaacaggagccattaagctcaagcatactcagaggtgattggatgaaaagactttaccgttcagaaaaaaaccgtaaaatcgccggcgtcgtcggcggtttggcggagtacatcaatatggatgcgtcgcttttgcgcattatcaccgttgtattagcgcttgtcacgagcggaatcgtgccgattgtatatattatctggtgttttgttgtacctttagaaggagatttgaaataaatgatcaaatgggcagtcagcattttagtaaatgctttattattaatcgttatcgcgggatattttgattccgtccatatcagcagtatcggagcggctgtcatcgccagtgtgattctttctgtgttaaatgtgctgatcaaaccgatcatcgtcatattgacattgcctgtcacggttgtgaccctcggcctctttctgtttgtcatcaacgccattacgttaatgatgaccgcagccttgatgggagacagctttcagattgacgggttcggcaccgccatttgggcatccgtcgtgctgtccgttttccacttgctgatccaaaaaggcatattggagccgcttagaaaaggataaaaaacaagctgtcccgagagggcagcttttttatgtgcggtttacataagcggcagcctcctgacgcaacataatgcatagggaggtaatgagatgaaacttgtgatgacgctcttttttctgattggtttgctttgtgtgagtccttctgcggatgcggcgcgcaaagaatcggcaatccccgtgaatcagcaggaattcggacagccgcctcattacataccgcttctggagaatcctccccaaatcgaagtaaaggcggaaatgaaaagaaacctgttcatacaggctcatgtacggaatgctgactatcaagcgttttcggcgtttcttttttataaacaaagcaatgagctggggtttaagatggtgccgatggagcccgcgccaggcgcaatccggctttttacggcccaggtttcaaaacgggatatctggaatggagaattggaatattacctcgttttcaccaacggcagacagcgggcggaatcggagaaaaagcggctgaagctggacggctatcaagccgatttgaatcatattcccgagctgatgattacggagcttgcggttgatacgaaaaatgaagatggcgctgatgcctatgaatttatcgaggtgtataacacgacggacaggcccattcattttaaagactatcatatccgctaccgctatccgaaggaagggccggaatcagatatgatatggaggccgaaagaggataccgtcattccgtcaggcgggacttacgtgttttggctgagacgcgccgcatcagaactgacgatagatgatttcaaccgctattacgggacacgtctgaaggaaggagaacatctcgccgtcatcgaagggacagacggaatgtccaacggccgcccgcgtacggtcgtgctgtcggcaaataccggcaaggatatcgcctcagcgcaataccggaaacacgctttccgccggctgacttctttgctgtacaaatatccgctgaacggaacgggagaattgctgaagatctccacgagcgagcataagccgtcaccgggctccgtttttcaggcgcagattccgcagcagaaaagggtgatcaaacccgacaaggaaaaaccggtcatcgaagaccttacagacagaaagcccgtccggcccgctgaaagcattgaattaaaggctgacataaaagacaaaaaccttgtcaaaacagccgcgttttattaccggaccaatgagaaaaaaccattcaaacgaattctggccgaaaaagaccgcaacgacagcttataccatcacattctttattccccggaactgctcggccaggatcagcttgagtattatatcgcagccagtgatggagaaaatgaagcaaaaacgcccgtcaagatgattgacattgaacagacgagcaaatcacacggactcagaatgaatgttgaaccggaagatacgatatccggcacctatctgctcaaagcgacttccgacgtcagcgccgataagatcaagctgtggattgacggcaagcggcaggagacccggccggcgctggaaaaagaggtctatttcgccttcgatgcccggaaaacgaatctttattttcaaaacaccgtcatgatggaaaacgaggtgctgcacatttttgacgatccgtctcaccgctacagaacgcactcggttctgcttccggaacgtctgctgctaaaagggggcaaaacacagaaagtatccatccgttcgggctcaaaggtttctccgtatgacacgggagagaatcgggatgattttgtcgtgaaacatgcccgtctggtgctttcggacggaacggtgatcaaagacgggaagacggacccgtccgagcagctgtttatcggtgacggcaagcgggcgaatcagcagaagaccttctcattcagcctgccggatcatttgtttacgtcacggctgctgccgtggaacacggcgaagctttcggaaggctatcaccatatttttgtcagtgacggtgaggagcagctgagccaatctgtgagggtggacaattcggggccgaagattgtcccgggtattaaagaaggcgcggcgctgaaaggtaatgttgagctgaatgcggacatccgtgataaatggagcaaagtggaagaggtgaaagcgtttttggacggagaaagcattacgctcccgcatcacacgtcatcagccgatctcaagcccggaaagcacacccttactatcattgcggcagaccttgccggaaatgaaacaacgtccgtccgcaccttccatatcaaacgggaggagccgaaccagccggagcttgccggtcaaaaaatcggcgcccgcaaagcaaagctgtccgtccgggtaaaagacccgacgaaggatgacatgaatgtatcattttatcgcggcttccgttataccgcgcggaatccgggcagcgtgaaagtgtataaacacgcctcattaacggaaccgccgaagggcataaaagaaaatgaaatgccgtttaccctgccggaaatgaaccgtatctcggcaaatgacggaaaaaccgtttcggcggaaagtgtggagcgttttccttatcaccggttcgaagtctccgttgacccgtctatcgacgaaacggatctggccgaggcggtctggaaaggaagctctctgcccggccgaaaggtaaccatgtatatttggaattaccggacaagccgctggcaggaggcggacagcgtccttgccaaagataaaaagccgtttacattaaaagccgccgtttccgcagcggatgtggtgaagaactcaaaaatgaatgtcatcgtgcaggatcaaataccggcgaaaggcaattacacgtttgtctggatgtcggatacacagtattacgcacaagggcacccgcacatttttgacaaaatgacggagtggatcaaagaaaataaggaaaagcacaatattaaatatgtctttcataccggtgatattgtcgatgattcaatggtgatgaaacagtggaaaaacgccgatcactccatgcggacgcttgacaaggcggggattccgtacggagtgcttgccggcaatcacgacgtcggccataaagacggcacataccgaaccttcggggatttcttcgggagccgccggtttgaacagaacatgcattacggcggatcatacaaaaataaccgcgggcattatgatctgctgtcggcaagcgggaacgattttattatgatttatatgggctggggcattacggaacaagagattgactggatcaatcaagtgctgaagaggtatccggaccgaaccgccatcttatgctttcatgagtacttgcttgtgagcggaaatcgaagcccgatcggggagacgatctatcgaaaagtcgtcaagccgaatcgcaatgtggcgatggtattaagcggccattaccataacgccatgaaaaaaaccgatgcgcttgacgatgacggagacggaaaaccggaccgcctcgtccaccaaattctgaccgactaccaggacggtccggaaggggggcagggctttatgcgcataatgcaatttgatcaggccgccaatcaggttcacatgttctcctactcgccgtacacggatgacatcaattactatgacaccgatctgttcgctgataaagacgaattctcagcagaaatggatttacagccgaagaggaaaagggtagcgactgattattttgaatgcaacgtttatacgaacgaactgctcggtcataaaaaacacgtaaaaagcggaaaaaccgcaaattgggtctgggacggcctgcagcctgattccgtttattactggtacaccgtcgtgaaggacccgtacaacggcaaaacaatatcaccgctgtggatgttcaaaacgggaaatacgccgtatcacccggctccggatcagtttgatttcaggcatgcctcaaacccatagcaaaaacatacacctgccgatcggtcagaagaaaatctgacggtcagcaggtttttttctgtaacatgcatggcggtaagtgtttttgacttttttatgtcccttttctatactaaaatcgattggttttcgtaatatgcaggaggaaacataatgaacagtaaaaccgggacaaaagaaagaattattcaaacctctgcatatctttttcagattcagggataccatgcgactggtttgaatcaaattataaaagagagcggagcacccagagggtcagtgtatcatcactttccaaacggaaaagaagaactcgccattgcggcgatcaaatatacgggaagatgcgttgaaaagcagatacagaatagtatgtctcaatccgcggaccctgtagaagcgattcagcactttattcatgtaacggctgaacagtttaatgatccgcagaatattgagggcgtgccggttggattgctggcgggtgagaccgctctgatcaatgaaacgttaagatgcacatgtgttgaggtgttcaagaagtggacggatgtgtttgcggcaaaatttcttgagcatgggtttgaacaagaggaagcggagaagcttgggatgacaatcaactcgatgattgaaggcgcaatcatgttttcattggctcataaaaacaaagaaccgctgctgctgatttcaaagcaggttccgtatattgtccaaaacagaggatagcattttattactcttttctttataaaaatagataccggaaccccagcctcttcgttttgacagagtcatagagaacattcaccggcttgatttgaaaatggcagatcaaaaaaacatctccaacccgtaacggttggagatgtttcatttcaccctgtccatataatgcacgaatgtgtagcggtcgcctctgtaggcggatttgacgtgctcaaaggcagtgccgtcctgcagataagtggtccgcttgatatagaggacgggggcgccgggctggataccgagcagctcagcttcttcctcggaagcggttcccggttcaagctcttgttttgcccgtgagatcggcatctgattgtacgcttcaatatgctcatacatggatgattgaaaatgggaggcatccaattttcccgccttgtcaaacgggatatacgatgcctcaatcgccatcgggatatcatttgccagccggacgcggatgattttatgaagcgttgccggatagccgcaccccaggatagaagataattcttccgtcgcctgaatcagctggtattcggcaagtctactccccggcttcatgccccggcttctcatatcttcggtgaagcttgtcagcccttgaagcggctgttccatcttcagtttgctgacgaacgttccccggcctttctgtctgtataaaaatccttcattcaccaaattggaaagcgcctggcgcaccgtcatgcggctgatgccgaattgttcggcgtattcccgctccgacggaagcagcgcatccgctttcagctcgccgtttttgatttgtgtttttaattgttccataatctgaaagtaaatcggaatcggagattgtttatcaatctgcataggtcaaatcctttcaatcgccgcccgcagccttttcatcaatcaagaccgtcacatccggatgcgcgtgcagggcggaggcggggaatgcttcgctgacgcgcccgtccagaagctgcttcaccgcttgggccttgctttttccggatgccatgatcagaatccgtttgccggacaaaatcgtcccgatccccattgtcagggctttttcagggacttgatcaattgacggaaagtaccgcgcattcgcctgtcttgtctcttcattcagctcaacaacatgggttcgggattcaaatggcgtcccgggttcattaaagccgatatggccgttgtgtccgatgcctaaaagctgtatatccgctccgccgagtgtttgaatcaatcggtcatagcgcccgcattcggcatcaagatcgtctgcccgtccgtcagggagaaagtggcggtcctttcggctgtcgatatgtgcaaaaaaatgtgtattcatataataatgatagctgtttttgtcctcgggagaaagcccggcgtattcatcaaggttgatcgtcgtgacattccggaacgacaagccttctgagcggtgcatccgcacaagttctttgtatacgccttcaggagtgcctcccgtcgcaaggccgagaacggcatccggcttttgtttcactgtttcagcgataatcgctgcggctttttcacttaattcttcataatgtctgcatgtgataacgttcatgtccaatcagcctcccttgagatatatgcggtgtttccgcggcaaatcgtggccagcacgccgcactgtccgtccgtcagaacaacgtcggcgtcttttccttcggcgatgcttcctttacggtcgaatatgccgaggcggcgggccgcatttgccgatgtcatatttgctatatccggccatgagcagtttgtaaacctgcgcatgagcgccgcgccttcattcatttttaaaatggaaccggccagcgtcccgtcagagagaagcgccgtgtccccgcgaacggtgactttttgtccgccgaattcgtattctccgtccttaagcccttttgcccgcatggagtctgtaatcatgatcaggttttggcttcctttcgccaaataggcaagcttaacagccagaggatgagaatgaatgccgtcagtgatcagctccgccgtgatgcggccgcaggcgagagccgtaccgatgccccccggctcacggtgatgaaaggagctcatggcgttaaagaggtgcgtcatatgcaccgccccggcatccgccgctttttgtaaaagctcggctcctgcgtctgtgtgtcccattgaggggatgatgttttggttttttaaataacggatcaggctgaaatcaggatcttcttccggcgcaagcgtcacgattttgatcagccctcccgagagccgctcccatttctgaaagagcccggcatcagcaggagtaatccattgtttcggctgtgctcccgcctttttcggagagacaaacggtccttctaaatgaatgccgatcaactcagcgcctttttgggtctccggtgaggaatacgcccattttttggcgttgatgagcgctttttcaatgttttcgtgctgctgtgtgatcgttgtcgctaaaaaagcggttgttccttcttcgggcagccgggcggacagtgtatcaagagccgcaacatcggcatccatcgtatccgcgccgtatccgccgtgaatatggatatcaatcattccgggaagcgcatacgagccctcgggcgccttccattccttctcatacgtttcttgcggccttgtttttcccgcgtaagaaatgatgccgtcctttataccgagaaaaccgtttcggatgatttctttttctgttacgatgtccgcaccgctgattaacaagctttcagccactttaaaacacgcctttctggttagttgttagttttattttactccttttcagactagttatctagaccagttatgccggaattgtataaatctgttttggttcagacggtaaagtgataaaatataactgttcaaagctcggaacatcccagaacaggaggaacatatcttggcaaaggttcggaccaaagacgtaatggaacagttccatttagaattgatcagcggagaagaagggattaaccgcccgattacgatgagtgatttatcacggcccggtattgaaatcgccggttattttacatattacccgagagaacgggtgcagcttttaggaaaaacggagctgtcatttttcgatcagcttcccgaggaagataagaaacagcggatgaaatcgctgtgcaccgatgtgacgccggctatcatactttccagagatatgccgatcccgccggagcttgtagaagcttccgagcaaaacggcgtgcctgtgctcagatcccctctgaaaacaaccaggctgtcaagcaggctgacgaattttcttgaaagccgtctcgcgccgacaacggccattcacggcgtgcttgtggatatatacggcgtcggcgtgctcattacgggaaaaagcggcgtcggtaaaagtgaaacggcgctggagcttgtcaaacgaggccatcgtcttgtcgcggatgactgcgttgaaatccggcaggaggatcaggatacccttgtcgggaacgcgcctgatctgattgagcatctgctcgaaatcagggggctcggcattataaatgtcatgacgctgttcggggcgggcgccgtcagaagcaataaaagaattacaatcgtcatggaccttgagctttgggagcaaggaaagcaatacgaccgtctcggacttgaagaagaaaaaatgaaaatcattgatacggaaattacaaaactgaccattcccgtccgcccggggcggaatctcgccgttattatcgaagttgcggcgatgaacttcagattgaagcggatgggcttaaatgctgccgaacaattcacgaataagctggcggatgtcattgaggacggcgaacaagacgaataggagttggcaataatatgaatgaagctggaacaccgatcaatccgattgccttgcagctcgggcctttatccgtgcactggtacggcatcattatcggcgcgggcgcgttattagggctttggatggccatgagggagagtgaaaagcgggggctgaaaaaggacatttttattgatcttgttcttttcgccatcccgatcgcaatcatttgcgcaagggcatattatgtgcttttcgagtggagctattactcggaacaccccggggaaatcattaaaacttggaaaggcggcattgcgattcacggcggattaatcggcgcgatcgcaacgggaattgtcttttcaaaagtaagaggcatctcattctggaagctggcggatattgccgcgccgagtattctgctcggccaggccatcggacgctgggggaactttatcaaccaggaggctcacggtggagcggtcagccggtcatttttggaaagtctgcatcttccggatttcatcattaatcagatgtacatagacggacaatattatcacccgacgtttttgtatgaatcgctgtggagttttgcgggcgtcgtgattctgcttctgctccgccgcgtgaacctgcgcaggggcaatctgtttttgacgtatgtgatctggtattcaatcggcagatactttattgagggaatgcggacggacagcctgatgcttacgagccagcttcggatcgcgcaggtcatttccattgtgctgattatacttgcgattattttaatgattttcagacgcatgaaggggtatgccgataagcggtatgctgacacggactgacgactgaaatcggaaaggacataagatgactgataaacatgtaaccgccattttattcgatctcgacggcacgctgattgacacgaatgaactgattatcgcttcttaccttcatacgcttgatcattattgcccggggcagtttaaaagggaagatgtacttccgtttatcggcccgcctctgtacgaaacgttttcaggcattaatgccgaaaagtgcgatgacatgatcagcatgtacagagcattcaaccataaaaagcacgatgagctcgtcacggagtacgaaacggtttatgaaacgctggatgaattgaaaaaagcgggctatcagcttggtattgtcactactaagctgagggatacagtcaatatgggattgaagctgacaggcatcggggcgtttttcgatactgtcgtcacgcttgatgatgtaaagcacccgaagcctgaccccgagcctgtgcggcttgcgctcagccggcttgggtgcgatccgtcggaagccatcatggtcggtgacaattatcacgacgtcatggcgggaaaaaacgccggcacgaaaacagccggcgtcgcgtggacgattaaaggcgcacagacgctttccgcctatgaacccgattatatgctcgagaaaatgagtgatttattgcacatcaccggagtgaagtaatccgtgagaaaaacagaccgccatccggttgcaggtgcaaattcattgtggcatgtttatcagacggttcccttcctgaaggtgatgaaaaatttcatcatcattcagattgcaaggtatacgccgtttttaagcgtgaaaaactggctgtaccgaacctttttgaaaatgaatgtcggaaaacagacgtcattcgcgctgatggtgatgccggatatcatgtttcccgaaaaaatcactgtcggaaaaaacagcattatcggctacaatacgacgattttggctcatgaatatttaatacgtgagtaccggaccggttttgtcacaatcggtgacgaggtgatgatcggggcaaacacaaccattctgcccggcgtcaccatcgggagcggagccgttgtatcagccggcacgctggtgcacaaagatgtccccgccggggcgtttgtcggaggaaatccgatgcaggtgatttatacgcacgaagaaatgaaaaaacgaatggaaaaccccgcagattaacgtcagcggggttttttatgacttgatcacaatggcctggctgcccatctgcttccaggctttttcaaagtcagaccggtctgtttttctgtttttatagccgtaaggatcattaacgtatacataatcgtgatcataaccggttacggctacgctatgcatgctgaacgtaatgtcgatctttccgttcggtgtatcccaagtctgcatatgatcaaccggcttaaaggatgtggtggtaatcacccagaccggccgccctttttcaagctggcggtacactgaagaaatgtcttttcccgtaagatcgtatactttgtttcccgcatattctttggcaagtttatcaatcggctcatgataaacgcctaaacccgggccgttttccatatctccggcaaatccttcattcggatctcccttcagcccgctgctgtatgtgagcggaactttattgattttatccgccaatgtattttttgacacatgatatccggcattgttcaaaatcatggcaaggctggtcacctcacagccattgtacagtctgggagaatccatctgtctgtacagaacgacattcagcggtgacgcgctcccttttaacggtgttttctcatcaggctcgtcggactgctgattgaaaaaatttaaatgaatatcgtttgtatagatgttatatcccagatagacaaggatggctgtcagaatcagcacacataatgttccaagcgtcttcattatcaattattctcccttgtttctgatgaagctgttctatgtattatagcacttctgctcaatatgattcgatcgttccgatatgtttacaggtttgttcattctttagccatgtttatggaaaagaataggcggacattgggcgttgcaatccattcttttatctgctaacatattatcatattagcgaactaaaggattcggaattttccttcagacaaagcggaggtgtaaaaggcaaatgtttatgtttgagaaaccgcatggcatgagagatacgctgcccggtttatacgaagccaagaaaaaagtccgttccacactgacggatttaattgataaatggggttatcagtttatggagacgccgacccttgaattctatgaaacagtaggcgtccagtcagccattgaagaacagcagctgtttaagcttctcgatcaggacggaaaaacgcttgtgcttcggcccgacatgaccggaccgattgccagggtggcggcatctaagctgcacaaacacaatcatccgctcagagcggggtacgcggcaagcgtctatcgcgctcaggagcgggaaggcggacgtccggccgaattcgaacaggtcggcgcggagctgatcggcgacggatcaacaagcgcggacgccgaggtgattgcgctggcggccggcgctttgaaaaacgcgggattgcaccggtttaaaatcgcgatcggccatgccggactcgctgatgagctgtttgtcgaggttttgggcaatgccgagcgggcggatgttctgcggcgctttctctttgaaaagaattacgtgggatacagggaacatgtcaaatcgcttccgctttcttcaatagacaaaagccggctgctcgcacttttggaattgcgaggcgggaaagagatttgcgccaaagcggaggagatcatcggaatctccggacaaagcttaattcaggagctggaagacctgtgggacattcttgaggattacggatgtgccgagcatattcgccttgatctgaatatggtaagccatatgagttattacacgggaattttattcgaagtgtacgcggcaaatgtcggtttcgtcatcggaagcggcggacgctataacaatctcctcggccatttcggcagtcccgctcccgccacgggcttcgggctccgtatcgacaggctgattgaagcgctcggcattcaggaagaaacaagtgaagcggacgccgtgattttcagcaaggagcagcgggcccaggctattttattcgcggaggaagaaagggcgagaggcagaaaagtcgtcctgcaggatctggcgggcattgaaaatatcgatcatatgacaaaatcattcgcaaacgtcacatactttatcggtgccagaaaggaagagaggaatgggtaaggtactcacaatggcaatgccaaaaggacggatattcgaagaagcggccgggttgctgaggcaggccggatacaggctgcccgaggagtttgaagaatcgagaaaactgatcattgacgttccagaagaaaatctccgctttattctggcaaagccgatggatgttacgacttatgtcgagcatggcgtcgctgatgccggtattgccggaaaggatgtcatgcttgaggaagagcgtgacgtgtatgaggtgctcgatctgaaaatcagcaaatgccatctcgccgttgcggggcttcccggggcggattggaacggagtcgcaccgaggattgcgacgaaatatccgaatgttgcgtcgagttatttcagagagcagggcgagcaggtggaaatcattaagctgaacggctccattgagctggcgcctttaatcgggcttgctgacagaatcgtagatatcgtatcaaccgggcggacattaaaggaaaacggtctcgttgaatcagaacatatttgtgacatcacatcgcgttttatcgtcaatccggtcagctaccgcatgaaggatgatgtaatcgacgaaatggcggccaggctggcacgggttgtggaaggagaaacggcaaaatgaacataaccgcagtaaaaagaagcgagcggttttcactgaagcgttccatcgacagcggaaccgaagagcagcggaaaaccgtcagggggattattgaagacgtcagacaaaacggtgacaaagccgttttggcctatacaaaaacatttgacggcatcagcctgaaccaaatggccgtgagcgcagaggaaatcaccgaggcataccgtctgcttgatgatcagctgctggaagtgatcagacaggcgattgccaatattaaagaatatcacgagcgccagctgcaatcctcttggttttaccatcgcaaagacggctcgatgctcggacagaaaataacggcgctcgattccgcgggcgtatacgtgccgggcgggacggccgcttatccgtcttccgttttaatgaatgtcatccccgcgctcgctgcgggagtggaacggatcgttctcgtcagtcctccgggaaaagacggccgcctttcaccgggcgttctggcggcggcgtctgagctcggcataaaggaaatttacaaagcgggaggcgcacaggcgattgccgcgctcgcttacggaacggaaacgatacagcctgttgataagatcacgggccccggaaatatatttgtagcactcgcgaagcgcgaagtcttcggcgttgtggatatcgacatgattgccgggccaagtgaaatcgtggtcctggcagacgatacggcggtgcccaaagaagtcgccgctgacctgctttcacaggccgaacacgatatgctcagttcaagcgtgcttgtcaccgattcacagaagcttgccgaagcggtatcagatgaggtgaataaacagcttcagaccctgccgcgcaaagaaatagccgaagcgtcgatcagggatcacggccgcatttatattacggaatcgatggaagatgcggtggacacggtgaatgagctggcgcccgagcatttagaaatcatgacgcattcgccggaggctttgcttggaagcatcagacacgcgggggcgattttcttaggacgatacagcgctgaaccggtcggcgattattttgccggaccgaatcacgttttgccgacaaacggaacggcgcggttttcaagcccgctgaatgtaacagattttcaaaagaaatcgagcatcatctcttacagccggaaggcatttgaaacgcacgcggacagcatttccgccttcgcgagactggaagggctggaagcgcacgcaagatcgattgaagcgagaaacggaggaatgaccgatgagaaaagcggaacgcgccagaacaacaaatgagacggatataaggctggctttcgaaatagacggagaaggaaaagccgacatcagcacggatgtgccgtttatgactcatatgcttgatttgttcacaaagcacgggcaattcaatttaacggttgacgcaaaaggcgatacggagatagatgatcaccatacgactgaagatatcggcatctgtttagggcaggcttttttggaggcgctcggtgataaaaaagggatcaaacggtacggatcagcgcttgtgcccatggacgaagcgctcgcccaagtcgccgtagacctgagcaaccggccgcaccttgagatgcgcgctgcatttccgcaagcgaaagtcggaacgtttgataccgagctggtacatgaattcctatggaaactggcgctcgaagcgagaatgaatctgcacgtcatcgttcattacggcacgaatacccatcatatgatagaagccgtatttaaggcgcttggcagagcgcttgatgaagcgtcatccattgatccgcgcgtcaagggtgtgccgtctacgaaaggaatgctgtaaatgatcggtgtaattgattacggtatgggcaatttattcagcgtgtcgaaagcgctggaacgcgtcggcgtcccgtatgtcgtatcagaccggccggaagagcttgaaaaagcggatgcttttattcttccaggtgtcggatcattcagtgacgccatggacaatttacgcagcacgaagcttgatcaattcatacaccgtatggttgacgagggtaagctgctcctcggcatctgcctcggcatgcagctcattttcgaagagagcgccgaaaacggctctgcaaaaggacttggtttattagccggaaaagctgtgagactcaaagacagagatgccgaaggaaacaagctgaaggtgccgcatatgggctggaaccggctgacgtttcaccaaacgtctcctttgctttcggaagcggaagaaggcttcgtttactttgtccattcctattatatagacgggatggaagacggcgatcttctggcaagcgctgagtacggcgttcgtgttccggctgtcgtcgggaaacgcaatgttttcggtgcacagtttcatccggaaaaaagcggtacagccggaatggcgatcttaacacaatttacaaaaatggcagcggaacagaaggtgaagaaatgaacgcttttacattatatccggcaatcgatatgagaaacggcaaatgcgtccgcctcatccaaggcgattacggcaaggaaacgatatacggtgactctcctttagacatggcggcgcaatttgcacaagaaggcgccgaatggattcatctcgtggatcttgacggcgcgaaagcaggcaggaaagtaaacgacaggcatgttcttgacattgcgcggcagcttgatgtcaaagtcgagatcggcggcggtatccgttctgaagcggatgtgtacggttatttatcacaaggcgttgatcgcgtcattctcggcagctcggccgtttccgatccggcatttgtgaagagcatgctgaaacaatacggcggcaaaatcgcgatcggccttgatgcaagaaacggatatgtctcgacggaaggctggctggaaacatcctcggtaatggcggccgatctgggccgtgaattggcggccgaaggagcggaaaccttcattttcacggatattgcaactgacggcatgctgtcaggaccgaacatcgaaagtaccgttcagctcgcaaaagcaacgggaaaagacgtcatcgcttcaggcggagtcagctcagtcgccgacctcaaagcactggcccgcttcaaagacgccggcgtatcgggagcgattatcggaaaagcgctgtatacaaaacaattttcattggctgaagcgctcagaagggtgaaggacgcatgatcacgaaacgaatcattccgtgtctcgatgtgaaagaaggacgcgtcgtcaagggcattcaatttctcgggctgaaagatgcgggcgatcctgtcgagctggccgaagcctacgacagggagggcgctgacgaacttgtttttctcgacatttccgcctctcacgaaggccgcaagacgatgacagacgtcgtagaacaagttgcggcaaaactggcgattccgtttacggtcggcggcggaatcaatcaattaagcgatatgaaacgaatgcttcgcgccggcgctgacaaggtatccgttaatacagcggccgttctccgtcccgagctgattacggaaggagctgagtttttcggctcgcaatgcatcgtagcggcgattgacgcaaagtatgacgaagattcggaatgctataaagtgtacacacacggcggcagacagaaaaccgagcgggaagtcacggcctgggcaaaagaagccgtcagccggggagcgggtgaaatcctgctgacaagcatggacgcagacggtgaaaaaacaggctttaatcatacgctcacacagcttgtctcacgtgccgtcccggtgcccgtcattgcgtcagggggagccggcagcgcgcgccatatgcttgaagccttcacagtcggtgaagcggacgccgcgcttgcagcttctattttccattacaaagagacatctataaaagaagtgaaagattatatgaagaaacacggggtgaatgtgagatgaaacaggcagatgaactgcggtttgacgaggccggactgatacccgccatcatacaggatgcggcaagcaaagaagtgctgacactggcttatatgaaccgagaatcctatgaaaaaacgatagaaacgaaagaaacctggttttacagccgttcacgcggggagctgtggcataaaggagcgacatcggggaatacccaaaaggtgaaagccatccgttatgattgcgatcaagatgccctcgtcgtgcttgcggagccctcaggacccgcatgccataagggaagctacagctgtttttccacggaaaaagcagacgcgcaggatcgtttcggcatcttaaatgaactggaaagcgtgatcgccaaacggcaggcggagatgcctgacggagcctacacaacgtacctgtttcgggaaggcgtcgataaaatcctcaaaaaagtcggtgaggaagccgcagaggttattatcgccgcaaaaaaccgcgaccatgaagaattaaaatgggaagcggcggatttgctgtatcatttgctcgttcttctgcgtgagcagtcgcttcctttggatgacgtgcttgacgtccttgcgaaacgccattctgcatctgagtaaaacaaacctcgcggagagacccgtgaggtttttattctgtcaaacttaaacattcaataaaatattccttatttccgcaaccgtaggcagatgaatttgataatattgactaatagagtttattttggtttttatcaaaaatatacgttttgttcatattccgttcatgcacatccgttatagtataaacagtgatataggaggaaaacatatgccgaataaacaaccaaaaccaaaagggaaattcagctcattcttttcattagtcaaaaaaacaaaaccatcatacggtatgctggccttcgcgctgtctctcagtattgtgacaacgctcgtcagcctgctgattccgctgttgacaaagcagctcgttgacggcttttccgtgtcgtcgctgtcaggcgtgcaaatcggaatcatcgcagccgtgttcatcgtacaggccgcattaagcgcctacgccacctacgccctgaactacagcggccagaaaatcatctcgggactgcgtgatttgttgtggcagaaattaattaaactgcccgtctcttattttgacaaaaacgccacgggagaaacgatcagccgtgtcaccaatgacacaatggtggtaaaagagctgatcacaaacaatatcagcggatttattaccggaatcatttccgttatcgggtcactgacgatcttatttttcatgaactggaagctcacattgctcgtgctgatcgtcgtgccgctggctgcggtgattttagtgccgatcggccggaaaatgtttaaaatttctcgggaaacacaggatgaaacggcgagattcaccggattattaaaccacatcctcccggaaatcaggcttgtaaaagcgtcaaacgctgaagaagcggaatacggacgcggaaaagcaggcatcatggcgctctttaaactcgggctgcgtgaagcgaaggtgcagtcgctcgtaggcccgcttattacacttgtattaatggcggcgctggtcgctgtcatcgggtacggcgggatgcaggtgtcatccggtgaattgacagccggcgcactcgttgcctttatcctgtatttgtttcagatcattatgccgatgggccagatcacttcatttttcacacagcttcaaaaatccgtcggcgcaacggaacggatgattcatattcttgcagaaaaagaagaagatatccaaatcggaaaagccattgaaaacgcggatcagccgattaagctcgaacaagtctcattcggctacaaaacagatcaaaccatcttaaaagacattacggctacgattgaggccggcaaagtcaccgcgatcgtcggaccgagcggcggcgggaaaacaacgttatttaagctgcttgaacgattctacaacccgactgcgggcagcatcctgctcggaaatgaaccgattgatgcgtattcccttgagtcatggcgggagcatatcggctacgtgtcgcaagaaagcccgttaatgtcaggcaccatccgcgacaatatctgctacggattaaaacgcgaggtgactgatgaggaactgaggcaagcggctgacatggcctacgccctgcaatttattgaagacttaccgaagaaatttgaaacagaggtcggtgagcggggaattatgctgtcaggcggacagcgccagcgcatcgccattgccagagcgctccttcgcaacccgagcattctgatgcttgatgaagcgacatcaagtctggacagccaatctgaaaaatgggtgcagcaggcgctggaagttctaatggaaggccgcaccacgatcgtgatcgcccatcgtttatccacggttgtggatgcagatcagcttctctttgtcgaacagggtgaaatcaccggacggggcacacaccatgaattaatggcatcccattcgctgtaccgcgattttgcggagcagcagctgaagctgaatgccgacttagaaaacaaagctgtgtaaagcaagactttatgaatagaaagcagctgaaaaagctgctttttattttgcagccggagttctcttcatagaaagcgggggttaaattatgaaaaaacgcacaaagattttttattggcacgcggccttactgctcgtattcatgactgccgggtgtacggacggtaacgatgaagagccgagccattcttcaagtccggccggagaaagcagcggcatcaacaaggctgaaacagcatcagcggcagaaaaaaaagaaccagtaaacaaagattcacatcacatctctgcggacaaaagcctgtcggcagattattctcctctgcaaattgaatatgcccgcatctggctgcagcttggggaaaatcagcagatagatgaattgaacgttcgccgcattccggccggagcactcgtcaaccctgacgatcatacgagcgcccgctatcccgaagatgttacgcagttagcaggctcccggttagtcgatgggtcagtcacttacagcagcaatggtgacggcaccattcagatatacaatgttcctttgcgctgggagtctcgtgaagatactgatcaaggcgtaatgaaagaagtgacggaggaaatgatccgccatacaaaaaaagtgtctgtcgatacaggagacaatgaaaaaataagatggttaatagacatcatgtcgattcattaaaagaagacaggcaaaaaagcagaaggagggatttttatggctgtcatattggttgcggatgacgaccgccatatccgtgagcttgtccgactcatgatggagcagagcggctttgacgtcgcagaagcggaagacggggaagcggcggtgcggctgatcgaatcagcacctattgatctcatcatactggatgtgatgatgccgaaaatggacgggtttgaagtcagtgaagccgtccgcagctttacggacattccgattttgatgctgacggcaaaaggcgaaacgctggacaaagtgcaaggttttacttccggagcggatgattatctcgtcaaaccgtttgagccgcttgaactggaagcaagggtcaaagcattgctgaaacggtaccggatcaccgctgaaaaactgctgaccatcggaaatgtcacattagataagcaatcccgcaccgtaacgcgcggcggcggagcgggattgacgctgccccggcgtgaatttgagcttttatttaagctcgccggttatccgaataagacgttttcaagagaacaattaatagaagatatttggggctttgattatgaaggtgacgagcggacggttgatgtgcatgttaaaaggctgagggaacggtttccggaaaaggactatccgtttgctatccatacggtgcgggggctcgggtatcggtttgtggtgacagaatgaaacggatcttcagaacggctggaaaaatcatcatccttctcaccgtcaccgcattcttatggctggcggctcatctgatcgttcagggattcggtctcatatggccgattttgcttgtgccgtacgccgagcagattctgacgctctggcttgttttcggcctgctgtttataacgatgtttatcttttcaaagtcagcacgtgaaagacatcatgcgatctgggattcactgaccgccacgatcaagcaaatgtcgagcggcaacttcacagcggccgcctccaggaaaatggagaagattgaacgggaccaccccgtgacgaaattggctgatgaactgtcgacactcgccgcggaactgagtgaaatggaaaagctgaaacaagaatttatttcgaacgtttcccatgaaatccaaaccccgcttacttcattaaagggctacgcgcacctcctgaaaaaaccggatttatcatatgaggagcgggggcgctatttacacatcatcgagacagaaacagaacgattatcaaaaatcagtgaaaatctgctgaagctcactgcgcttgaacgccaaaccgaaccgatacaaaaaaaaccgttccgcattgacaaacagctgcggcgcaccatattgacctgtgagcctgaatggtccgccaaacagattgagtttctcattgatttacaggagtcgtatgtgtacggagatgaagcgctgctcagccaagtatggatgaatctgattcacaatgccgtgaaatttaccggtgaaggcggccgcatttccgttaaaattgttgatctgccgggagcggcggctgtcgaaatcgccgacgacggaatcggaatggagcctgaacaggcggagcgggtatttgaacggttttataaagcggataaggcgagaaacgcagggggaagcgggctcggcctgtccatcgcccaaaaaatcgcagagctgcacggcggttcgatagaggttgagagcaagcgcggcgaaggaacccttttccgcgtcattcttccagccgagcctcgtgaaaaaaacagctaaaatctggtcgaaccagccagtaaaaaacgaagccgatcctgtcttttgaactattgaggcgaaaccgttttatggtatactactgacggtaatacgtataaaacggaggatatttgtgggaaaacacacttctgaacagaaaaagcacgcgcaaattgtccagctgcttcaggatggacaatatttttttcataaaggcttaaaagcatataaagagcggaatttaaaacgggccagcaaactgattcagcgggccgtccatctcgagccgaatgattccgaaatgctgtcacggctggccgtcatttattctgaaatgggccactaccagcagtcaaatgagctgttcgactttattttggtgaacctgaaagaagaaatgcccgagtgtcattattttaaagcgaataatttcgcgcatttggggctctttcaggaagcatacaaagaagcggaggcttattcagatgccgatccggacggggaattcagcgaagagattgaaaatctgatggagcttttggatttcggcgaagcgggtgaaaacgaatcgctctatgaccaggatgagctgctgatcaggcaggaccgggcaaaaacgcttcttgagagcggccagcttcatgaagcggttgtcatgcttgaagagattacggccgattaccccgagctttggtctgcatacaacaacctggcgctcgcttacttttactcaggcaatgttacaaaagcgaaacagacggtattcgaagtgcttgagaaaaatgaaggcaatctccatgccctgtgcaacctccttgtattctgctattacgagagggaagatgaaaaagtcggagaattgagcggaaaactcgccaacgtgtatccgattttattcgaacagcgctataagctgggggcgacgcttgcgcttgtcggcagacatgatctcggttataaatggctccgttctctttacaaaagcgggttcgaaggcgacgaaacgttttattactggcttgccgcctcagcctacgggacaggccgcacagaatttgcggaaaccatttggaaaaaggccgaagccgaatttcccgaatcagaccggcccgcgccttgggcggagcggcaggaaccgctgcctgcttcacttgaacagcggcttgccgcctattatatcagcagcgctgaaggagagcggaaccagcttgaaaaagttctgacggcaaaacgcgccgtttcaccgtttgaacaagatttcgtcagactgctgctttccggtgaaaaaggcgcttcaggcgtctccggtgacgcgctgttcacgtatcggacggtcaagcttctggagaaagcggaagccgacagtttaaaaactgacgtcatgagctgctgggtttttcacgtcattcagcacatccgcgccgccgctgccgtacagaatgagcgggcatgggccgcagccatcgcatacgtatggaaagaagcaaacggcgaaaaaacgacgaaaaaagaaacggccgccgtttacggtataaccccggcaaccctttcgaaatacatcagacaaatagatgatatattagaataaaaccgattctttctatataaagagtcggttcttttttttattataaaggggcaaaacagaactttaccgccgaaaaaagaggtattcatacgtatttttttgctttttgaatcgaaatcaggccgtaatcaccgtttattttgcaaaatatgagatttgcaatcacattgaaatataactgtaataaaaattgtcgaaacatgatggtataatgagtctcgtacataagagattagtttattttacatgtgctgtataatctataccaattaaccagattcaaagaatcgtacataaaaatcatcagcctcacgggcatgtgagggagcgtaactttgatgttcataatagaattccaaatgagaacaggtttaaagtaaaagggaggaaagaaaaagtgaaaaagagtttattaacacttggtttggcttccgtcatcgggacaagcagttttttgatcccgtttacaaaaactgcatcggcggaaacattagacagcaaaaaagcgaaaattgaaagcaagcaatctgaggtggcttcaagccttgaagcaaaagaaagagaattgtccaagcttcaggacaagcaggctaagattgaaaaagaactgaaagacattaacgctaaagcgttggatacaagcaataaaatcgaagataaaaaagctgaaaacgaaaaaacgaaaaagcagatcgctgatttgaaaaaagaaatcaaagaaacagaagcgcgtattgaaaaacgcaatgaaatcctgaaaaaacgcgttcgttctttacaggaaaacggcggttctcaaggatacatagatgtacttttaggggcgacaagcttcggagacttcatttcccgtgcgactgcagtatcttctatcgttgatgcggataaagacctgatcaaacagcaggagcaggataaagcgaaactcgaagacgcagaggctgaacttaacgtgaagctgaaaaaagttcaagatgatcttgcgaaactcgagtctatgcaaaaagacctgaacaaacagcttgatcagaaagacaagcttttcgacgaagcgaaaaacggtcagaaaaaagcggcttccgctatctctgatctgaaaaaagaagcgtcacagcttgcaaaccaaaaagctgacactgaaaaagagcagaagcgcattaaagctgagcaggctgcagcggctgccctgatcaaaaaacaggaagaagcgcaaaaagcttctgaagaccaaaaccaaaaagatgacagccagccggcaccggcggttaaaactgtgaaaaaagcggctgtttcaacatcatctgattcatctgacagctcaagcaaaccgaagagcacttcaggcggatcatctcataacagcggcggttcagatgattctgacggcggatctgttatttcaaattcaggcggtattgaaggcgcgatcagcgtaggatcaagccttgtgggtcaatctccgtataaattcggcggcggacgcactcaatccgatattgacaaccgtatctttgactgctcttcattcgtacgctgggcttatgctaacgcaggcgttaatctcggacctgcaagcggcacaaacacagatacattaatcggaagaggtaaagcagtaagcgcgtctgacatgaaacgcggagacttagtattcttcaacacgtataaaacaaacggccacgtcggcatctacttaggtaacggaacgttcctgaacgataatacatcacacggtgtatccattgattctatgagcaacccttactggaagaaagcattcaacggcaatgtaagacgtgtcgtgcaataatgaataagacaagggccttctatcccggaaggctctttctttatttgtatacccgctcaggagctccctaatcacggtttctcagaaaaatgagcaaaaaaatagcgaattgccctcagatttaataggatatgggtaaggaatacgattgatggggattcttagtcatatagggtgcgccccatttcgaaaaggagtgaatcatggtgtcagaagaaaaaatttatgatgtgatcattatcggcgcgggtccggcggggatgaccgctgctgtttacacatcacgagcgaacttatccacattaatgatcgaaagaggaattccgggcggccagatggccaacacggaggatgttgaaaactatccgggttttgaaagcattctcggccctgaactttctaataaaatgtttgaacatgcgaaaaaattcggtgcggaatatgcgtacggcgatattaaagaaatcgtggacggtaaagaatataaaacggtcaaagccggttcaaaagaatataaagcgcgcgccatcgtcatttctgccggagcggaatacaaaaagatcggcgttcccggcgaaaaagaactgggcggccgcggcgtatcgtactgcgcggtttgtgacggcgcgttctttaaaaataaagagcttgtcgttgtcggcggcggagactccgccgttgaagaaggcgtctatctgacacgcttcgcttcaaaagtcaccatcgttcacagacgtgacaaattgcgtgcgcaaagcattcttcaggcgcgtgcctttgacaatgagaaaattgacttcaaatggaacaaaaccgtaaaagaaatccatgaggaaaacggaaaagtcggcagacttactcttgtggataccgtgacgggagaagaggaagaattcaaagctgacggcgtctttatttatatcggtatgcttccgctttctaaaccgttcgaaaacttgggcatcacaaatgaagaaggctacattgaaacaaatgcccaaatggagacaaaagtcccaggcattttcgccgcgggagacatccgtgaaaaaacgctccgccagatcgtaacggcgacaggcgacggaagtattgcggctcaaagcgttcagcattatgtggaagagcttgaggaaacgctcaaaaccgttaaataatcactgtaatgttcagtttttgaatcgttactgtgttttaattacgctgtaacacgggtgaaatactgatgttttaagatgaatgtagtaattgaccccctttttaatgaatacactttggcacggattccagtatccgtgccctttttttgcgattttttgttttctgtcaaataaaagaaaaggatgtcggtgtctctgcattgtgagagacatgccgaaacggtataatgaagagacgatgatttgttgagaaggttaggtgacgtacttgtgcaaagagtgacaaattgtgtgctgcagacagatgatcaggttctccttctccaaaagccgagacggggctggtgggtcgcgcccggcgggaagatggaaagcggcgaatccgtcagagattccgtcatcagagagtacagagaagagacgggcatttatatactaaatccgcagttaaaaggcgtgtttacctttattattaaggaacaggaacaaatcgtgtcagagtggatgatgtttactttcgtcgccgactcctacacggggcggaatgtcgctgaatcagaggaaggcgttctgaagtggcatgacgtaaaagatatccacagccttccgatggcccccggagacgggcatatccttgattttatgatcaagggccaagggcttttgcacggcacctttacgtatacgccggacttcgagctgctcagctatcgtttagatccgcagcttatcaaataaaagaaagaccgcagggggggagaaagatgagtatgaatgaaaaccatgatattcagctcgtcatcattacgggaatgtctggagcggggaaaaccgtcgccattcaaagctttgaggatctcggctatttttgcgtcgacaatctgccgccttccttgctgccgaaatttttggagctgatgaaagaatcaagttcaaaaatgagcaaggtcgcgcttgtcatggatctgcggggacgtgaattttttgacaggctgattgaggcgctggatgaaatggcggaaaatccgtggattacaccgcgcattctctttttagacgctaaggattccatccttgtgacgagatacaaagaaacgaggcgttctcacccgctggccgctaccgggcttcctcttgaaggaatcgcgctggaacgccagctgcttgaagaattgaaagggcgctctcagctgatctatgacacatcggatatgaaaccgcgtgatctgcgtgaaaaaatcgtggcgcatttcgccacgaaccaaggtgaaacatttacagtgaacgtgatgtcattcggtttcaaatacgggcttccgatagatgccgacctcgtgtttgatgtaaggtttctgccgaatccattctacattgaaagcatgaggccgcttacggggaaagatgaggaagtgtcatcctatgtgatgaagtggaacgaaacacaaaagtttattgaaaagcttgttgatctgctcggctttatgcttccgtcttataagcgggaaggtaaaagccagcttgtcatcgcgatcggctgtacgggcggccagcaccgctccgtcacgctcgctgagtatttggctgactattttaaaaaagatttctatactcatgtcactcaccgggacattgaaaagagaagccggaaatgaataagaagccgaaaatcgcaatcttcggcggcggaacgggtctgtccgtgctgcttcgggggttaaagcataagcccgttgatattacggcgattgtgacagttgctgatgacggcggaagttcaggccgtctgcgggatgaacttcaaattccgccgccgggtgacatccgtaacgtactggctgctttgtcagatgttgagccgctcgttgaaaatctgtttcagcaccgtttcaacaaaggaagcgacttaaccggacattcgctcggcaatttgattttggcagcgatgacaaatataaccggtgatttctttcacgctgtcaccgaaatgagcaaggtgctgaatgtccgcggcagagtgctgccggctgccaacaccagtgtcgttcttcacgctgaaatggaggacgggcaggtcgtctccggagaatcgacaatcccttcttacggccagcgaattaaacgggtgtttcttacgcctgaaaaaattgatccgctgccggaaacgattgacgtcatccgtcaggccgatttaatcattatcggtccgggaagcctgtacacaagcattcttccgaatctgctcgtgccgaaaatcggagaggaagtcgtcaaggccgcggccaaaaaagtatatatatgcaacgtcatgacacagcccggcgagacgcttcaatacagcgcggccgaccatgtcaaggcgctgaacgatcatatggagcagccgtttatcgacacgatcttaatcaacaatgaggagatccctgacgaaatcaaaagcaaatatgcgaaagagctggcccggcccgtcgacttcaatgttgaaaagctgaaatccatggggcttgaggtcatcagggatcagattatcacgtataaaaatggcgtaatccgtcacgatacacataaagtggcttctcttcttgtcgatttattaagggactagaggccttttgaaatgaggtggctaatatgtcatttgcatcggaaacaaaaaaagaactgacgaatctggaagtgaaggactgctgcgccaaggcggagctgtccgcgctgattcggatgaacggttccctgtcattttcaaaccgccatctcgtgcttgacgttcaaaccgaaaatgcggcgattgcccgccgcatttatacattgctgaagaaacaatatgatgtatcggtcgaactgttagtcagaaaaaaaatgcggctgaaaaaaaataatgtttatattgtgcgcttttctgaaaatgcaaagctgattttagaggaattgaaaatcctcggggagaactttgtatttgaacggaatatttctgaggaactggtggcgaaacggtgctgcaaacgttcttatatgagaggggcgtttttggcgggaggatctgtgaataatcccgaaacatcgtcgtaccacttggaaatcttctcgctttataaggaacataacgattcattatgcgccctgctgaatgattttcatctgaacagcaaaacgcttgaacggaaaaaaggctatattacgtatttaaaagaggcggaaaaaatcactgaatttctgaatgtcatcggcgctcacaattcactgctgcgctttgaagatgtgcggattgtcagagatatgagaaactcagtgaaccgcctcgtcaattgtgaaacagcaaacttaaacaaaaccatcggggcttctctcagacaggtggaaaatattaaatacattgatgaacggatcggtcttgaagcgctgccggaaaagcttcgcgaaattgcgcagctgcggattgattatcaggaggtcacgctgaaagaactgggggaaatggttgcaagcgggaaaatcagcaaatccggcatcaatcacaggctgagaaagctcgatgaaatcgcagaacagctgcgtacaggacaaagcatcactttgaaataaccgtacagaaaaggggagatcttatggttcaggggaaagtggaagtgcgtttaaagacgggattgcaggcgcgccccgctgcattgtttgtacaggaggcaaatcgttttgcatcagatgtgtttcttgagaaaaacggcaagaaagtgaatgccaaaagcattatgggattaatgagtctggcggtcagtacggggacggaagtcactctgatcgctgaaggcgacgatgaaaaggaagcgctggaaaagttgtccgcttatgtgcaggaagaagtgtaaacactttgtaagggggacggaacgatgaatgagtttctgaaagattgttatcaaacgataggctgggaaaaggattccctcgatttcagcaacctgccggagtttttaaaggcgctcgcgtatcggtttccgtttgaaaaccgcgccgttttgtccaaaaaagaatatgacgtcacgaaagaaggactgtggcggcacatggtgaaggaacctcacggcggtctttgttatgacttgaacggactgctttatttcatcctgaaagatgccggatttgatgtcaaattgatccgcggaacggtctggaaaaacggctgggcgctgcccggcacacatgcggccgtacttctttccgccgggggaaatgagtacatcgctgatgcaggcttcggcctcaatctcgccatgcagcctgtgccgatgtcgggagacgagacggtatcagcggccggagcgttccgcgtgaggatagaagagacggaattcgggacatacgtgcttgaaatgaacaaaggggacggctggcagacaggctacgcattttcgcttgaagaaatcgatgaaaaggacctcaagtctatgaaacaaacaatctttgaacatgaacgttctcctttcaacaaacgcctgcttgcttctaagcggacaccggaagggcacatggttctgtctgaacgcaatataacaataaaaaaacacgatggcacggcggaaaacagcagaatagaccgctcagagtttgaagaaaaatttactgctcattttatatgaagcttgcagattctctgcaaaaaaacggcctccgcagggaagccgttttttgtatgtgtttatctcatttttgtaaaggtttgatagtggtctgtcgtcttataaatcagccagtcgcttgagtaaagaatccggtctgaatttctgaagcctgatgtatagttaatatccgcttcacgccacgtccgtccgctttttacagggagtttgccttccctgtttgagaagatgtccccgccgatgcttttccccggggcgacgtccgccagattcccctttgatgccacccagccgagggcctgtgcttctgattttgtaatgtagttatcaggaagcttgtgataggtctgaagataatccgcaaccccgtcaaacgtgttgataacctgtgcttcagtgtgcgccttgtgagaagatgtatccgtcttggcagccgttgaaaacagcatccccgccgcggagaacagcaccagcaaacaaacggaaatccacgataatcgttttttcaaagcaatacctcccatttttatcatgtgaagctgattccttttcattgtatcagcatcaagagaaaggaatagaaagaattttaaaatagtacttttgatctagcgaaaaataaaccccggctgaaacggccgggatttttcatctcattgaaattccttcgtgaggtttttcggtgtttttccgtatacggcgtcaatcatgttctgtgcggcttgcttgaacatattcaagcggatttttgcggttgctgacccgatatgcggaagcaatgtgacgttttccagctgcaggagcggattatcttcggcgatcggctctttttcaaacacatctaaaccggcgccttttatccagccctcttgcaatgcgcggatgagcgctttctcatcaactgtctttccccgggaaatattgacgaaacatgccgtatctttcatcaatttaaattccctctctcccatcatatgatatgtttcgtcagtaagcggggtaattaaaagcacaaagtctgatgttttcagcagtgtatctaagtcggtatatgtaaccccgagttccttctcggcatccggttttctgctgcggttataatacagcacgtccatatcgaagccgaattttgcccgtttggcagcttgttcaccgattctgcccatgccgataattcctaatgtctgatggtggacatccataccgaaaagagattcctcctcaacggttccccatttgccggcgcggacgaatcgatccaattcggcaacccgtctggcggaagacagaattaatgaaaaagccagatcagcgacagtgtcatctaaggtgtacggtgtatgcgtgccgacaaccccgcgccttttcatttctttaatattaaaattatcatagccgactgaattattgctgacgaccttcagcttcggcgcgtgatccagcaaatcactgtcaatcgccgttccggatgtcagcagcccttcagcatctttcattttttcgtacagtttctcttttggaatggtatcttctttccagatgtcatagcggcaatgctcgtctatcatttgttcgacttcgggcggtatcggtttcgcgatgaatacatagggtttcaacgggcttctcctcctttgtctttcttctctattttattatataagagaagcggtaacgtgagaaataatcaaacgcattacgataaatttctggttcttttgaacttaaaatgaaagaaaaaggaatgtacatgcttgatttctccaaacaataacagaatccgcctatatttctgaaggcaaaatgagcggaaccgctgttttcaaaagctttataggttggtgtaaagataaattttattatttttgaaagatataaatgaatataatctgaatttacagtcaaattatcgtgtctttttttgaaagcgcttttgaggcctttttctgtgctataattccttactgtaagctgggtaagaaggcttgcaatacaatcggatgggagatgaatagaaaaatggtttctttatcaagcattttggagcacaaccagcagtttgtccaagaaaggaaatatgaaccttaccaaacgacaaaattcccgaaaaaaaagcttgtcatcgtatcctgtatggatacaaggctgacggagcttctgccgcaggcgatgggactcagaaacggcgatgccaaaatcataaaaaacgcgggagccattgtttctcacccatttggaagtgtcatgcggagcattttggttgccgtttatgaactgcaggcagaggaagtctgcatcataggtcaccgcgagtgcggaatgtcgggattaaatgcggcttccatattaaataaagcaaaagagcgcggggtggaggacaaatgtctcagccttctgcagcatgcgggagtcgatttggaaacatggctgaccggttttcacagcgtcgaagaaagcgtggcccacagcgtgaatatggtcaggcatcatccgctcttgcctgaagaggtgccggtgcacgggctggtgatcgatccgggaacggggacgctggatgtagtcgttgacggttatgaaacagtcaaaggaggatgcagctgacgatgcaatttaccggcagatatcagggatacaatttgcagaaatttcagaaagacctaatcgcgggaattgtggtcggaattgtagcgattccactggggatggcctttgccatcgcctcgggggtcggtccggaatacgggctttacaccgttattgtggccggaattctgatttcgctgttgggcggctctaaatatcagatcggcgggcctacaggggcgtttgttcccattttatttgccattgtgatgcagtatggttttgagaatttacttgtagccggttttatggcaggcgtcatgctcgtcctgtttggcgtatttaagctcggaaagattatgaaattcgtgccgaagccggtgatcgtcggatttacggccgggatcgcggtgctgattttctcggagcagattgcccattttctcggtctgcgcgatatccaaaagcatgaaagctttatcctcaacattgcggaaataggcaagaagatcggaacctttaatttgtacagcatcctcatcgcgggaattgctttggccattttgctgttatcagccaggctgatgccgaagattcccggcgcgcttgtggccctgcttgtctctacagccgctgcggtcgtgttttttcctgacaaaatggcgacaatcggttctgcttacggagaaattccgcggcagcttccggctttccagcttccggatttctcaattgataacatggtgatgatgtttccctcggctctgatcattgcgcttctcggcggacttgaatccatattatcggcgatggtcgcggacaatatgaaaggatcacggcatgacagcaatagggagcttgtcgggcagggcatcgccaatatggcagcgccgcttttcggcggcataccggcaacgggagcgattgcgcggaccgcaacaaatattaaaaacggcgcagtttctccgatttccggtgttgtccacggagtcaccgtcctcctcgtcctgctcgtcttcgccccgcttgccgttcacgtaccgctggcaagcatggcgccggtattgatggttgtggcttggaacatgagtgagcggagggaagtcgccaatatgatgcggctgaaaaacactgattcattcgtactggcggcaacctttttgctgacggttctgtttgatttaattatcggcgtttctgccggtcttgtgctcgcttttgttttctttatcagaaaaatgagcgaatcaacaagcattaaaacaccgcatgccgcggtcaaatcggttaaaaatgattcgtccgtcagcacatattccattgaagggccgctgtttttcggttcaattgattcactggaatcatcgctgctggagaggcttcaggaaaagccgaagacgcttattctgctgatgaataatgtgcattacatggatacctccgcagaagcggtgctggggaatgtgatgaaccggatcaaacggcataacgggagattgatgatcgtcggattgcaatcacagccgagagagctgatccggaagacggggctgtttcataaaatcgggaaacagcatttctttgagcatcaggacgagataacgggataaattcagatacggcctgtccatgaaaaagcggacgggccgtgtttttattcggtttcaaagcgcttgatcagtttttcctgatgggctttcatcgcatcttctaacgtgattccgtacttatcggcaaggatagccagatttccgaggacgtcacccatttcttcaatcagctcctgcctgcgttcagcctgggttgcgtccttttcatccggccggtctctgccgatttcatatgctcttaccgcccgggcgagctcacccgcttcttccattaaaaagccgattctgataaatggcccgtacgccgtccatcctcgtttttcgtaaaaatctttcgtccattgttctgcttcagccatctgcatgtgaaacactccttatgtcctgtatgattcttattgatattatcatatagagatgggacaatatatagtgtattttgatttattgatgtacatatatagatgcggagatgaaaaaatgaaaaccatttgtgtatttgcggggtcaaacccgggggtaaatgaagagtacaaacgcaaagcggccgaactgggtgaatatatggcggagcagggaatcggccttgtttacggcggttcacgggtcggtctgatgggaaccgtcgctgatgcgttaatggcaggcggcggaaaagctgtcggcgtcatgccgagcgggcttttcagcggagagattgttcatcagaatctgacggagctgattgaagtcagcggcatgcatgagcggaaagcgaaaatgagtgaacttgccgacgggtacattgccatgcccggcggtttcggaacatatgaagagttatttgaagtgctgtgctgggcgcaaatcggcattcatcaaaaaccgatcggactgtacaatgtgaacgggtattttgagccgatgatgaagatggtcaagtacagcatccaggaaggattttcgaatgagtctcatttaaagctgatacatagttcctcccggccggatgagctgattgagcagatgaatcggtatacatacccgattttagataagaaatggcgtgaattgtaaggcagcggtctgaaatatgtttcggcggctgcatctaattcattctgacggaaagttcttttctccttctcatgcgtaccacgcctttcttcgtaataagagatatgtctgagaataagaggcgaatgagactgctgttggggttgaaagaagaacatccatttcctcagaggagatggatgttttgcggtttccagactgtatgcgtttacaacttttgttgcacgaaagtttcttccgatatgaaatcatcctgctgcatcttttgtttttttgaaccgattccaaatataccgactgtcagtgcacaaagaaaccagcagcctgtaaagaataagaaaacacttaaaaatccgtagcctgaatacaggaaactgacgacaaagggaccggctacatttgcaaggcgtcctacgccgtaagtgaggccatttccagatgccctggcttcaaccggatataattccggcgtataagcatatgcgatcgaactgaaagtacgctcaaacatatgcatgagaaatccgcatacgataatgaccatcggcaaaggattgatgccgtaaaagaatccaagcgccataataattaacgataaaacagaaatggcccactttcgatccacacggtcagagatttgcgccgcaatgagagcgcccagcggggcaccgatcgttcccagagtgacgtatacgatagactcatccattgatacgccttctttcaccagaagggtgggaacccacgtgccaaagccttgaattgcaatggtggaagctgcccacatcgtcattaaaacaaaagttcttcctgctaaaggcttttgaaacagcgtccgatatggaacggattttacagcggtttgtctgctttgcagagccggagctggttcaggcagttcacccttttcattttctgcttttgcctccagttcaagcagaatgcggtgtgcttgttcgctttttcctttcgtgtccagccatttcggtgattcttccagttttctggcgatcagcggaaaaaaaataccgaccgcgccgaatagaaagacaaaccgccagccgtaagaggcggacggcacgaccaatttagccacccagccggccgcaggaattccgcatatgccgattgtaatacagattgcctggtatttgcctttagttgcggatgggaaaaattcgctgatatacgtactcgccacaatcgttgtggcgccgatacctaaactcgtaaaaaatctaaaaacaccgagtatttctgggttccaagccagagaagagaggagggagaaggaagagaaaaaggtgacaaccagaattaaaccttttttccttccgaaacggtctgaaaaccatcctccggcagaggcgccgataaacattccgaaataggagacagatgtaataaaagcgatagtatgagtggatatgttccattcctttaaaagtgaaggcgccgcatatgaaaacgtatttaaatcgataaaatcaaaaaagtaagcgaatgaaaggataacgagcactgcttgatgggcccttgaaaaaggcagtctgtttaatcgattagacgcatttacattgatcatctcgtattcctccgtttatctttgacttgtctgaagacggtattaaccaatgtgattgagcgtattcatgctgtaactttgtttagtaaacacatagccttcagagatttttcttgctgtgcgtactactttaatcgttgttccatccggatcaacatctgcctcggtttttaaaataccgcttggatgccccaatcggatcgttctcccggagaatgaaaattcagataatattgtatcttgcaatagcatgccggcagtcgtacataccgcccctgtaatggctaaagcttgatgcggtttttgcatggacatcatacgaatgacaagatccatctcttctgcgtgtctctttatcccttttgtatcgatataatccgctggagatgagattaatgtcagttttggtacggccggtgattttgcagcagcctcatgtctcggagcgaatctgcatttctcggctgcaatcgatcggatcatttcgagcttttccaatatatccggggtatattcatccggaagttctaagccggtaagccccgtgtcctctgcttttacaaagacaagcggattggcgtaatcaataatcgataccgagatatttccatacggggtatcgagaacatcaataggctgaccggtgggaaacagcttaccggtcaccgctccttcagcctggtgaaatgaaagataaataggagaagctgtacctggaacccccggaatagagcagtccccctggtaatgaaatgttccatttctgacttcgacttctgctgcgatcactttttgagtgtttgtatttaaaattctgacttttgtaaccggctcttcagcttgaacgagccctttctcaatagcataagggcctacggcagaagagatatttccgcaattgcctttgaagtcggtaaatttgtcagtcagactgacctgagcaaacgtatactcaacatctgcatcctttctggcggatttcttaataatggctgccttgcttgtgagagaatggccgccgccgagaccgtcaatttgtctctcgtcagggctccccataatgtctaaaagaaaatcgctccataggtttgtatcgtctggcatgtctttttgaagaataaaaacgcctttgctggtgccgcctctcataacggttacaggaactttttccatgctgtctcatccttacatcattttgtgtggataaaaaggtaccggtccctttggaagatatcgtatgataaataaggattataagtaaaacatataatttttataaagttaaataaaaaacttttataataggagaaaattttatagcagaaaaatattttgggggatttcatatggatgaaaaggattggattgtgctcattacattattcgaagaaaaaaatatgacgaaggcggcagagcgattatatatgacacagccggcgttaagttatcggctcaaaaacctggaagcacaattcggagtgcgccttttttataaaagaaaaaaagggatggagttcacttcagaaggtgaacatctggttgattattcgaaagagatgctgcaggagttcagaagagtgaaggatgatatgctcaatatgagccatgaagtcagcggggttctcagattaggagtctcaagcaattttgctcagtataagctcccggcgattctaaaacggttttctgatcagtatccgtctgttcaattccacgtcaatacgggatggagtgcgaaggtgatggatctgcttcatcattcgggggtacaccttgggattatgagggggaattatgattggcaaggagaaaaacaactgctgaatgaagagaggctgtaccttatttcaaaaactgaaatcaacagtgaggaccttcccaaattgccgatgatttattatcaaactgatgcttctttgaaaagtttgattcaaaaatggtggaataaccaatttactgaaccgcctttcattgcaatggaggtagacaggcaggaaacctgtaaagagatggtgaaaaacggcctcggttattctgttgtgccggaaatctgtcttcagccttctgatgaattatacacattggcgctatcctataaaaataatgaacctgtgatacgcgatacttggctcatgtatgattcttcagcgttagaattatctgtcgtcaaagcattcattacttttttgaatgggaataaagcataaaaaaacctgcaagagacatcatctcttgcaggttttttgggcattacttctggtcttccgtattgcgtgtcagcactttatcgattaagccgtattctaaagcttcatcagctgatttgaagttgtcgcggtctgtatcgcgctcaatgacttcaagcggctggccggtacgttcagcaagcactttgtttaatttgtcgcgaagcaagagaatgcgttttgcggcgatttcaatttctgtcgcctgtccttgcgctccgccaagcggctggtgaatcataacttcactgttaggaagcgcgtaacgtttgcctttttctccggctgcaagtaaaaatgctcccatagaagcggccataccgatgcagatcgtggatactttcggtttaatgaactgcattgtatcatagattgccataccggcagtgattgatccgccagggctgttaatgtaaatggaaatatctttttcagggtcttccgcttcaaggaataaaagctgtgacacgatggagttcgcaacgttgtcatcaatcgcagatccaagcatgataatacggtccttcaaaagacgggagtaaatgtcataagctctttctccgcggttcgtttgttcaatgactgtaggtattaaattcataatgctcctccttcaccttttaggtaagtatgtatttacatgatacatttttggtcaataaaggtcaaacaaaacgctgaccaaaatgccaaccttttcttctaacaccatttttcccataaaacaaaaagttcaaacagcaaagtgaaaatgaggatgatcagcgccggagccttgagaaaatgatatggccggagcgctcaaaatagaccgcagtcgcgtcggtacatacggctgaacggtctgactacgttgtccgtccttccaaaagccgtaccggcaaatacgtttccagcggcaaatcatcaaattcgccttcaatttcttttgctaaaatctcgatggctgttttggaaatcaattcgatcggctgctggatggttgtcaagtccggcagaaccgattgaacggtttcagtgccgtcataaccgatcacttttaattgattcgggaggtctttcccccgttttttagcctcggtcatcacggcagccgccatgatatcatcgctggcaaaaattccgtcggtgtcaggctgttcatcgaataatgttgaaataatatcatggtaatgctgataaaagggtacttcatatgtaataggcttccgtccgtgttcatgcatgacgtcttcgtatgcttttcttctgaggtttgccggtgtttcgagttcaatcgggccgttgagatggacgatgtgccggcaccctttttcaatcagcagttcagccgccttttttccgccgtcatagttgtctgagccgacgacgggaatcgtgtccgataagtaatgatcaatggcgacaatcggcagattctgcttgtgataattgagaattccccggttataagtcacggcgatcacgccgtccacttggtttcttatcagcatctccaaatatttttcttccttatcctttcgatgtaaactgttgcaaagcagcagtttgtagcccatggacgtacaaatgctttcaatatgaaaggcgagttcgccgaaaaacgggttgctggagtttgggatgataagtcctattaaattggttcgttttcggaataaagagcgggccagatcgtttggaaagtaattgatttcttccatcgccttgtacactttttcttttgttttttcgctgatatagccgcggttatttaatacccgcgaaacggttgtagatgaaactcccgctattttcgcaacatcatgaatgttaggcttcattcccgtgccctcctgcatactgaaatggcttacaatttccgtcacgcacttattttagagaatcaggctgacatgtgcaaggacattccatgtttctgttttcatataaagagggtgcgttttgtttgattggaataatcagaaaatcatatgtcaaccgattgacatatgaaaccggttgacatacaattctttttgaaagcgctttatttacggagtgaagggaagtgacgggtatggagagatggctggcggcaataaagtgaaagaatcaagcagcggcggaaagtaagcgcttactcggagctcgcatgtatgtgatgaatatgaagaaggaagtatgcggctcaaaatgactattaaaaggtcctattaaaggagcggtgcaaatgaaaagctcaaaaagtctgtattggaaactgagtgcttatttcttctttttcttttttacttggtcttccagctattctttatttgcgatttggttagggcaggaaatcaatttaaacggatcagcgacaggcattatcttttctgtaaacgccgtatttgccctgtgcatgcagcctctttacggttttatctctgacaaattggggctgaagaaaaagatattgtttatgatcagctgtcttctcatattcacgggtccgttttatatctacgtctatgggccgcttttacaatacaacgtctttcttggcgccgttgtcggaggcttatatttgggagccgcttttttggcgggaataggcgcgattgaaacgtacattgaaaaggtcagccgtaagtatgatttcgagtatggaaaatcaagaatgtggggctcgctgggctgggcggcggctgcattttttgcagggcagcttttcaatatcaatcccaatatcaacttctggatcgcgtctgtttcagccgtcatattaacggccattatcatgtccgtgaaaatagaaatgaccgatcatgagaaaaacagagcggaatcggtccggttaaaagatgtggggcggctctttttattaaaagatttctggttttttatgatgtacattatcggggtgacttgcatttacggcgtttatgatcagcagttcccgatctactatgcgtctttgtttccttcagtgtcgatgggtaaccaagtattcggctatctgaattcattccaggtgtttttggaggccggcatgatgtttcttgcgccttttatcgtcaataagttcggagcgaaaaacagtttgattttagcggggtttttaatggctttccgcatcgtcgggtccggaattgcagttgagcctgtaggcatttcatcaatgaaactcatccacgcactggaattgccgattatgctgatcgccgtttttaaatatttggccgccaattttgatacgcgtctgtcgtccgtcctttatctcgtcggttttcaattcgcatctcaggcaggcgcgtcgattctgtcgccgcttgcgggaggattatatgacagtgcggggttccgtcaaacctatctcatcatgggattcgtcgtctttggttttaccgtcatctccatatttactttattgggcccgaaacaaaacagcaggcgtgtccagcgtctgcaaaaaatcggatagagaggatgttacaaatggacagaattcagcaggcggaagaagctttgaaggaagccgagggtaaagtgaaacaaagatatcgattggggtatcatattatgccgcgggcgaattggatcaatgatccgaacgggcttattcagtttaaaggagaataccacgtcttttttcagcatcatccgtatgatgagcattgggggccgatgcattggggacatgtaaaaagtaaagatctcattcattgggagcacctgccggttgccttagctccgggggacgaattcgatcaaagcggctgtttttcgggaagcgcggtcgatgatcatggaagattagcccttatctatacaggacataatataattgatcaagagaaagacctattctatcagactcaaaatatcgctgtcagccaagatggaaccgtgtttgaaaagcttcaggaaaaccctgttattacggaaccgccggaagacagcgcccgtcatttccgcgatccgaaagtatggaagcatcgcgatgtttggtatatggtcatcggcaactcttcaaaagaaaacgtcggacgggtcgttttataccgttcacctgatttgcgtgattgggaatacgcgggggttctcgcccaaagtgacggtaatctcggttatatgtgggaatgtcctgatttctttgaattaggcggcaaacatgtcctgctgatttcgccccagggtatcgaggcggacggcgattcatataacaatttacatcaaaccggctatttaatcggtgactataataatgaaacaaacaaatttacacacggcgcttttaaagaactggatcacggccatgacttttacgccgtgcaaacattattagatgataaaggacgcagaattgccatcggctggatggatatgtgggaatctgagatgccgacaaaagcggacggatggtgcggtgcactgactttgccgcgggaactgactttgcgtgatgatcataaacttttgatgaatcccgtggaagaaaccaagcagctgcggaaaatggaatatcgggaatgtgccggacgatcggtttcagggagttacttggcaaagacgcccgaagacctgcttgaagtccgagccgtgtttgatgtaaacgattctgatgccgaaacggcaggttttaagattcgcggccttgacgaagaagaacttgtgctgacatacaatctaacggataaaaagctgacacttgattgcaccaagatggggaaagacggtgtgagaagggtgcggctggatgcaaacggcaagctggcgctgcgtatctttattgacagatcctcgattgaagtattcgccaatcatggagaaacaacgatgacaagccgtatctatccgaatgaaggcagattggggattgagctgttttctgagaaaggcgccgtaaaggttgaggaattcacctattggacgttaaaggacatttggaaaaaaagctgaaacgggtgattatcgctttttctgaagcggctggaaatgtaccgagccgagggcagtccgcctgaaatacattttttgtgaaaatcaatgccgttaaacgatgcaggattatgcagcgtcctcgtgcagcataatcctgttgtgtataatcaaaaaagagttgctttctgtgcgtttctttattataatataaaggtatctgattgaaaaaacgtgcgctcgtagctcagttggatagagcggtggtttccggtaccacgtctgtcgggggttcgaatccctccgagcgcgtctcagttaagacgataggaaaaacctcgcagatgataaatctgcgaggtttttattttatcttgttttgaaactgttaatgaatgtgtctctgttatgttcggtgccggcaatcagccgcgcactttcactgatccgctgcgcaagagctttttgcgccttgccttcaaagctgttcaatagtgctgaatacacttcatataattcatctttcaatgtgtccatttcgaatgtcggtttcagcgtttggcgcactgtttccagttttgtccccgctgcctgcgtcatggcggttttcagcatctgccgctgcagccttttcttcatcgggtcgtccttgtgttctaaaagttcgtctaatgtcggcattatgtatccacctctatcatcttaaccagtttgcgagcatctggtctttttcctgaaattcgtccgctattttatgtaagaatccgccgatctcttcaaggtccgtgatcgccgcctgcaaagaatcaataaacgcctgctcagcctgtgtgtcgtaaaaaatcggtcctttatcgtaggattgcgcaatatcttcaattgtattggtcacgtcctgtgcttgaagctgatcaaacaagccgtgtccgacttggccgtaaaattccgttttcagctcggcgattttttcatcgtgctcctgataggcgttctgcgcttcttttttcatcgtccgcaaatcctcagtcatggcctgcaccttttcagccagcttctttgcgtttttcggcgttacttttatcgcgtctccgcttccgatcgcaccggccggcagaagagcgccgagatttttatcgaagactaactcatctccgttcggatttgtgatgtttccgtttcggtcaaatatgaaattcgcttcatttaagccgtgtgtatccggatttctcagaatgacggtagtaaagaaataagcgagatttttgccgatctgctcgttcaagttcccatcaagccgctgcttccggctgaactgtgagagtgaggggtttttcgtataaatcgttgtcccgttgtggcggtcatattcgttccaataacccgccccgaccatgtcgtccggattgataattgaccggatgtaaggatcgtatatgccgctgttgatgtctttctgtgtttcctcatcgtgcagtttcacgacggaagggctgttaaacgcgacggcgtacacatcattattcaccgcgctgtattcggcctcagcgccgccgagtgaatggccggttgttgaaataatcgttgatgttccggcatactttttctttacgctgcgtaccagctgatcggcttgatcgatttgcgatgttttcgttatcagcttatactttccggttgtgagcatggcgtcttgagagggcgttccattatattttccgagtgttttcgaggtatcctccgcgtctttttttacaatataatacacttctttttgcggatcattaccgaaaacaatattgccgccgtccgcttttacgccgtcattgatcgggtcttttccgatatcggttcccgcaaaagcgacgaccacgttttcggggttttttgattttatccattttccgtttttggacttgatgccttttgagaatacaaaggcatcaagacccgtatcagaatcctgcttcactttctcaacgtaccaatatgacgtcttacttattttataaggagttttatatttcatatgcagggctaacattttataattgtaagctgcttgactcaaacggtaatattctttatctgtgacatcagagacggttatttcttttccttttggcatatatacatcacctttcttatattgtaaaatagttccgaaaggatgatacgcatgagaaaatacattattatcctaattgttataattatagcagtgggaggttttttcgtgaagcatcaatatgataaacataaaaacgaagaaaaacttgtgattgaggcgcaagatcatatgaggaattacttaaaaaaagactataaaaatgtacaggaagttcacttttcaaaagactacaatatcgatccgacaggcggagttgaagtttcaggctacataaataataataaagaaaaagaattttccggtatatatgatccaacgaacaaggagataggtatttcagtggtcaatgccgaagaaaggtaaaatacccacctcaggatgagtgggtatttattttgtttaattatcttacaaaattcgtgatatgtttctcatacagttcaaacctattcctgagatcaatcgcctctaccgtctcatttgtcgaggtatccccgatattaacggtaaacgcgtacaaatatcatgacaactcaacgacaggaaaacgtcagatcagcattttactcgctttaagttccaatcttaacttgtcagcaacaatcgcgatgaattctgaattggttagctttgcttttgacatgctgaaagtatattcatatcaagttttcgctcatttcgtttacttaagaacgacagttatttataggaagggtttgatttccaaatgaaaaagaaaaagtacataattatccttattttaataattatagcagttgggggactttttatgaagcatcagtatgatcagaaggaaaaagagattgcgttattcgaagaagcccagaatcatatggaaaagtttttaacaatgaactataaaaatgtggataatatccatttttccgatgattaccatattaatccaatgggtggtattagtattaagggttatacgaatggaaaaaaagagtttgaaggtctatatgatccaggcaataaagaaatattatcatatacggttgatgccgaacccaaagaagaatgtaaagataagctttgtacaagataaattagccagctcaatcgagctgagctaattttgttttattgctcttactctatctcctcgacataaaacaaatcttccataggtacatttaatcctcagttaataatgaatagtgttgtgatatcatatcttgtatttgttttaaatctgcttatcgcagcctcagtagaaccaactaaatcagccaattccttctggatttgaattcctttctccttcatcacttcatttaacctagatctaactataactaacgcttataaaaaagtattctcgatcactgatacttgatacgttgatgttttttagacatgtacaacaccccgaggttgatataaatttaatctaagaaaggatgagtttgtgaagagatgcaaaattgccctaatatttgtgataactatagcgtcaggaagtatctacatgaagtaccaccatgattaaaaagaagcagaacaagaactttttatccaagcgaaaaataaaatggaaagttatataaaagctaattacaaaaatataaagcggattacatacattaacaattataaaataaatcctatgggtggtatttccttgaaggggtacttgaatggtaataaggaaaaagaatttttcggactttatgacaaaacgaatgatgaaataggagtttcgtcagtcgatgcagaagagaaacccgaatgtcaggaaaaagaatgtgaatactaaaaagacgctggaataaagaagtactctggattgccgcttatatgatcctctgcggacattaaagaaaaatcttaagaccctaaatgcatcggatgtcaccaccatttttccattccgcgagcttcatcataactgatgggacggatgattctgtgaaaaaatatattattatcttcattatcttaatagcagccggaggttttataatgaagagtatgaatgataaaaatgttcaggctgaagagataaagattgctcaagaacgaatggagaaatttatcaaagcgaattatgaaggcatacataacgttacatttaaagataaatatgaaacagatccaatgggcgggatagaggtatttggctattacaacgatgatacatcaaataaatttgacggtatttatgataaagcaaatgacaagattatgggacacactatagatgctgtgagaaagaaagaatgcagagataaagattgtgattactaagaagacgctcgtctgcgtttttttatagatgagcttaatgaaaaagacaagggtttcggcatgtgccgcccttgtcttttttattgaacactgtaaaacataaccggaaacagctcattatttgacagtccattttaacagcgttacaattaatcatgtaaatagttacatgtttaaacaaacatattgtctcgggaggtgatacgtccttgaatgaaccttctttaaaaaagtcatttatgagtcagtgaaacgcatcattgatcccgagcacgtgtatttccgcactgtgcctgtgtttgaaacaagcaatgaggcatatcagcatctgcaggaccggctgtttatcggggctgcggtcagattgccggatgacattcggttagatatttatgaaattcaataataagatggagagtgagtcaacatggaaaactttatcggaagccatatgatttacacgtatgaaaacggctgggagtatgaaatctatattaaaaatgatcatacgatcgactatcggattcatagcggaatggtaggcggccgttgggtgcgcgaccaggaagtgaatatcgtcaagctgacagaaggcgtatacaaagtgtcatggactgaaccgacaggcacagacgtttccttaaactttatgccgaatgaaaaacggatgcacggaattattttcttcccgaaatgggtgcatgagcatccggaaatcacggtgtgctaccaaaatgattacattgacgtgatgaaagagtcacgtgagaaatatgaaacgtacccgaaatatgtcgttcccgagtttgcggatattacgtatcttaacaatgcgggaatcaataacgaaacattgatttcagaagcgccatacgaaggaatgaccgatgatatccgtgcgggaaaattaaaataagagaaaaaacccggcagcttggccgggttttttgtatccttttacgagagggttttggtcatgataaagtcgacttgtttatcatcccccatataaaaagagtgttctccggtttggacaaaccccattttttgataaaaggcgattgcattttcgtttttttcccatacgcccagccagatgttctttttattgtgtgctgttgcgattttcacagcttcattcagcagatatttgccaagcccgtgtttctgatggctttttcttatataaattctctcaatctcaagagaatcttcccccattttttctgactgtgcttcgttcatgttgacttttacataccccgcaaggtcatgatgataataaacaaaatagaattgagaagacggattggataattcctttttcagctgttcagagcggaatgcattttccaaataagctttcatattttcaggtgaattttgatctttaaatgtatcattgaatgtttcaatgcttatctcccggagctctgttatatcgttaaggctgcacttttttaatttaatactcagggtcatacagctcctttcttcatttatcataccagctgaattttgttgtatttgcaatgaaaataccgtatagtaaacataccgtaattttgttgtatttgcaacataaaataagaaaatgaggacgataaagtgaaatatgttttttatgttttaggaatcatgatcttgacctttggtatttctgtcacgattcaatcagatcttggaacatcgccttttgatgcgcttattgtgggattgtccgtccatgcagggcttaccgtgggaagctgggaaatcatcatcgctttcctgttaatttgctgtaattcaatgttaaaaaggcaaagaccggaattttcagggatgattacggcgttcataacgggaatcgggattgatatgtggcttttttttctgcatcgagtcataacgcctgaactatggtacggaaaggcgggctgttttgcaatcggtttagttgtgatagggataggaaccgcaacctatctgcacacaaatttcgcaccgatcccggttgatcggttaacgctaattgtccgtgatttaaccgggagaagcatctttttttcaagaacggtcatttacttcatatttttcatactggccttgatgctaaaaggtccggtaggcatcggaacgttattaaccgtttgtttaggcgggatcttccttcatttctttatgccgattaccggaagatggatagacggcatattaacagcatctccaaagcaggaaaaaacgaaaacccggtaacggcggtttttacccgattctatcatttttcatttcacccgcatgtttaaggtataataaaaaagggggagggatttttatgagcggtcaaagaaagctcgttttttacggagctgtcagcgcagatggctatcttgcgcgggaaaatcattctttagattggttaatcggaactgaaggtgaagacagcaccgattatgaagctttctatgaatctgtcgatacgatcattatgggcagaaaaacatacgaggaaatattggttttattgcctgaggaatttccgtacaaaggtaaagaatgctatgtgttttcgcggacattgaccgggcgtactgaacatgtgcggtttattcatgaagagcctgccgattttataaatgcattgaaacgccaagaaggcaagcggatttggattgtcggcgggagtgatctgctgcacccggttttggaggaaaaacttgtcgatgagtttatcattcagatcgcccccgttctgctcggccgcggaatttctttgtttaaacccggagaccgggagacaggactgaagctgactgatgtcaggcgttacaaacaatttgcggagttgcattatgaagtgagataaaatgaaatgtatgaacgaaacccagtaaaggttaccgggtttctttttcatgtttgtttttatgttttgaaatggtgtgggccggaccgcatgaaaatcctgcaaccatgataacaacccctatccacctcacggcatagaaatcagtgtcgcgcaggaagataaatgaaactaagataataagcgccccgattataacggcagctgtgccgataatacttgatttctccatatagaaactcctttatgaatgtttggttaacgtattgggttggaatataacatatcaggggtaatgcggaaatggatatgctgcgaagctgactgatgtctgtaagatgaaaatgaaacgccaagggagccggctcccttggcgttttttatgcttgaaacaggatgcggcgttttgctgaatcgggatcactttcgacagcggtatccgtgttgaaaagcaaagtttcgcgtgaatcggtttcatattcaggccaattgaagtgagaggtgttcgggtttccggtttttgcaaaagcgagccatgcggattgaatttgtttggaaagctgttctgcgtcatcaccgagcggctcttgcagcgtctttctcaaagaatcaaagtttccgaacacaaacggcaattccagagcgtgaacggctttatgaaacggcggtgtttcgccatgccaatcaaagcggtacatccagaccggtgcgtgttgcgactgtccttgtgcgaaagcgacagccggccgccagaaaatcagatccgtcatcatatcgatttgtccctttaatgaatgcggatataaatctgccgcttgctcggtgcagttttctccgaggtgataatgcaaataatcttgctgctttttctcggagtgaatgtctgtatcaggggtgaaaaacaaatatgcttcatcacgattggttccgatgatcataggtatgccttctgcggccccgtctgctatggctttcaccggttccgcaggcaatgtggccggatcgatggcgggctgaaacaaaagctgaaaaatgttttgatccagtgagcgccgcactttatccgcagtcttaagcaggtcattaacggaaagctcctgcaattgatcagtgccggcttcatgaataaatgccgccgcgatgtcttttgccatatccgccggcatcgtatgagaggcgccgctttctaaaatggctttatgaaacaggccttttgcgtcaggcattgccataagcgcagcgatgctcatgccgcctgccgattcaccaaatatcgtgacgttatccgggtctcctccaaattcggagatattgtccctcacccagcgcagcgcggcgatctgatcgagcagcccgatattggcggaatacgcgtcatgaatagaagacaaatgtaaaaagcctaacggtccgagcctgtaattgagtgtcacgacaatgacatctccgtcagcggcaagggcagatccgtcgtaaagcggttcgcttccggcacctaaataaaatgccccgccgtgtatccataccatgacaggctttttttcgccctctgaatcgggggcgaaaacgttgaggtaaaggcaatcttcagattgaggcggtatatctccggaaaacgatatggacagcatatcatccggctgcggacaaatcggcccgaacgaatcggcatgttttatgccgtcccaaggtgcgggcggctccggcgctttaaatctcagctctccgacgggcggcttcgcgtacggtatgcccttccatgtgcgggcaccgcggccggcagttcctttcagtgcgccgcagcgggtttgaacggtaagttttgtcatgatttcatccccttttttcttttcattataaacagagatgaaggcatgaagcgaataaaagccctttcatcagcatatcatcagtaacgcttccgttctaaaaatgatctgacttcctgaacggacaagccgagttcttttgcttcctgcatcagcgctttccattcttcaatgttggattcagtcagttttctgttacggtaggatgcgggctccgggcgcttttcagtcagtttgttcgtaaaggtgaacagttcttctttcggcatgcccgactgcacggcctgcacaaggtggatgcgccactcatcttccgtgcctcccatgtgatgcagcatcgtttcggcatcaaaaagctccgtcagatcgacctgcagggtggcggatacttttttcagaaattggatggacggatttgagtgaaccccccgttctatcttgcttaaataagatttagagacacctgcttcaactgctagctgattaatagagtagccttttcttctgcggtataaacgaattattcttccaatcattgtgctgaattctcccctgtatactggcatttttttgttcattataagaaatttttcgttctttataaaatttaaaattataagggaagtgcagtaaataagaggaaaatcatgataatgttctctaaaaagaactaaatggcttaatttgaaattttcaaatttcgaccttttcttttataatccaatcattaacagaagggggcgtttaagcctgatgcaataaggatgaggctgtaattacatgaatgagaatatgagttttaaagagttatttgacattattaaacacagatttttactgatttttatcatgacagcagttgtaacgctgatgacgggatacatccaattccgggtgatttcgcccgtttatcaggcatcgacccaagtgctcattcatgaaacaagcggtgaaaaaaattcgaatctcagcgacgttcagctgaatcttcattacaacaatacgtttcaaacgataatgaaaagcccggttgtgcttgagaaagtgaaacagaagctgcatctttctgagacggcatccgctttaaaagcaaagatcacgacaagcagcgaaaccgattcagagatcattaacgcagcggtgcaggacgagaacccgaaacaggccgccgctatagcgaacacgctgatgaagacatttaaaaaagaagtccgtgacaggatgaatataaaaggcgtcattgttttgtccgaggcaaaagcatcggaaagcccgatggtcaagccttcgcgcatcaggaatatcatgatggcgttcggtgcggctctcatggcgggtgtgacgcttgcgttttttctccactttcttgatgaaaccgttaaaagcgagcggcagctcagcgaaaaaacagacttgcctgttttaggggttgtgtatgacatcaaaaatcagcagacacggtctgatgaaaaacatttcggggagtgaggcgtttgggattcagaaaaaagaaatcaagaaggggactggctcaaatatccgttttacatcacaaatcattggtggctgaacaatatcgcaccattcggacaaatattgagttctcctctgttcagacccatttgcgctctattctcgtcacttcctccgttccgggagaaggaaagtcattcagcgccgccaaccttgccgcggtatttgcgcagcaggaaaaaaaggtgctgcttgtcgatgccgatttacgaaaaccgacgatacacgagacctatcagcttgaaaatgtacaaggccttacgaatgtgttagtcggaaacgcttccctcggcgaaacggtgcaaaaaacgctgattgataacctttacgtcttaacgagcgggccgacgccgccgaatccggccgagcttttatcttcaaaggcgatgggagagctgattcaggagatgtacagccggtacagtctggttattttcgattcacctccgcttttggcggtggcggacggccagattttagcgaaccagacagatggaagcgttctcgtcgtcttgagcggaaaaacgaaaatggataccgtccaaaaggcgaaagacgcgctccagcagtcaaaggcaaagcttttgggggcgctgctgaataaaaagaaaatcaaaaaaacagagcactactcgtattgagcggtgcaggtgatgtctccttacctttatcaacggaggcactcggctctgctgtgggcggcgttttccgccgccttagatgctggtcgtcggtggcggggtgtgaggacgggttaaatgcccaatttatcttaagatgatgcattgttatcggcttagctgttatgtctgtttttacgaaaaccgtatcagctaaaccgataaatgaggaggggaaagattgacttaccggagaagactttcaatgatttttgcattggatacgtatctcgttttactttccgttgttataggatatcaattttttgaggattcttatcacttttatgactccggagcgttgctgctgaccgccgtgaccatgctgatcagccatcatgtatgcgcttttatgtttcaccagtataagcaggtatggacgtatacgggaattggcgagctgcttgatctgctgaaggggatcacgctgtccgcagctgtcacagccgccgtccaatacggggtgttccacacgattttgttccggctgttagccgtcagctggatggttcagctattgttcatcggaggaagccggatgatttcgcgcgtgctgaaagaaacgatcggcaggaagcaaaatgactcttcccgggcgctgatcatcggcgcaggcgcgggaggaacgctgctcgtccgtcagcttacgcagaaaaatgatctcggaatcatgcctgtggcttttattgatgatgatcagacgaagcataagctcaaaatcatgggcctgcccgtcatcggcggaaaagaaagcattatgccggcggtgcaaaggctgagaattcaccacatcatcatcgccattccgtctctttgcacccatgagctccagacgctgtacaaagaatgtgtgcagacgggcgcccatattaaaatcatgccgcaatttgatgagatcctgctcggaacgcaggctgccggacacatcagggatgtgaaagccgaagatctcctcggcagaaagccggtcacccttgatacgagcaaaatttctgacagcatcaaagggaaaacgattctggtcacgggcgccggcggctctatcggttctgaaatctgccgccagatcagctcgtttcttccgcatgaaatcgtccttctcggccacggggagaacagcatttattcggtgcataacgaactgtccgcacgcttcggcaaagaggtgctttttcacgcggagatcgccgatattcaggacagagataaaatctttacgttgatgaaaaaatacgagccgcacgtcgtctatcatgcggccgcccataaacatgtgccgttaatggaacataatccggaagaagccgtcaaaaacaatattatcggcacgaaaaatgtcgccgaagccgccgatatgtgcggaacggaaacattcgtgctgatttcttctgacaaagcggtcaatccggccaatgtcatgggcgcgacgaagcggtttgcggaaatggtcatcatgaacctcggaaaggtcagcaacaccaaattcgccgccgtccgtttcgggaatgtgctcggaagccgcggcagcgtcattccgattttcaaaaagcagattgaaaaaggcggacccgtcaccgtcacgcatccggcgatgacaagatattttatgacgatccccgaagcgtcaagactcgtcattcaggcgggggcgcttgcaaaagggcggcagattttcgttctggatatgggagaacccgtcaaaatcgtcgacttggcaaaaaacctgattcatttatcaggctatacgacagaacagattcctattgaattctccggcatccgcccgggagaaaagatgtatgaagaactgctgaatcataatgaagtacatacggaacagatttttccgaaaatccatatcgggaaagcgatcgacggggattgggccgtgctcatccgttttatggaggaattcagccgtctgcctgaagatgagctgagaaaacggctgtttgaggcgatcgaatcagtacatgaagaagcggccgcaggtgtgtgatgggaggacagaaagatgacgaaaaaagtattattctgcgccactgtcgattatcattttaaagcctttcatcttccgtattttcaatggtttcaggatatgggctgggaggtgcacgtcgcggcaggcggcaatatgaatcttccattcgttgatgaaaagttttccattccgatccggcgctcgccgtttcatcccgaaaatctttctgtttacaggcggctgaaacggctcattcaggctaacggctacgacatgattcactgtcatacgccggtcggcggcgtgcttgcacgccttgcggcgagacaagcgcgccaaaaagggacaaaggtgctgtacaccgcgcacggctttcacttctgcgatggagcgcccctgaaaaattggcttctttattacccgatcgaaaaatttctctcttcttacacggattgtttgattacgattaatgaagaggattacgaacgggccaagcaaatgaaaaaaacagcttgcggcgcgaagaaaatacacggcatcggcgtgaatacagacaggtttcgccctgtgagccgggcagagagtgaacgtctgagagaaaaacacggcttcggcgccggggaatttatcctcatataccccgctgaattaaacggcaataaaaaccagggacttctcattgaggctgcggcactgctgaagaaccgcattccggagctgaaactcgtatttgccggagaaggcgcgatggaagagccgtacagaaaaaaggctgaatcactcggggtatccgacattgtgcggttttacggtttttgccgtgacattcatgagctgattcagcttgccgatctgtccgtcgcctcaagcatccgcgaagggctcggcatgaatctgcttgaggggatggctgccgaaaagcccgccgttgccgcagacaacagggggcaccgtgagatcatcgaagacggtgtgaacggttttctcgtgccggcaggggacagcgcggcatttgccgatcggattgaaaagctgtaccgatccccgggtctgcgaaaagcaatgggacaagaagggcgcaggacggcggaatttttttcagaaacacgtacggtaaaggaaatggcgcacatttacgccggttatatggataaaaaggagaaaagcgtatgaatgcaggagcacaaccgaaaatttccgttatcatgggaatttataattgcgaagagactttagcggagagtattgaatccatcctgagccaatcgtataagaattgggaactgattatgtgtgatgacgcgtcaactgacggaacgtatcagattgcgcgccgttacgcggatcattacagcgaccggatcacgctgattcaaaataagacgaatcaacggcttgccgcttcgctgaaccgctgtctgacatacgcaacgggggattatatcgccaggcaggacggtgatgacatctccaacccgaggagactggaaaaacaggccgctttcttaaacaagcacgcccactatcaagtcgtgggcacggggatgctcgtatttgatgaattcggcgtcaggggcgcccggcttttgccgcccgtgccgaaaccgggaattatggcgaaaggcacaccgttctgccacggcaccattatgatgcgggctgaagcgtacaaagcgcttggaggctaccggtcagtcaggcggacgcggcggatggaggatatcgatttgtggctgcgcttttttgaagcgggtttccgagggtacaatctccaggaaacgctgtataaagtaagagaggacagtgatgcgttcaaaaggagatcgtttacgtattccattgataatgcggtgctcgtttttcaggcatgcagacggctgaagctgccgatttcccattacgcgtatatcgcaaaaccgctcatccgcgccattacgccgcccgcggtcatgaaccgttatcataaaaacagggacatccgccaaaaagaagggcttgccgaacatgactgacaaaccgatgcgggtgctgcacatcttcagcgggatgaacaggggcggcgcagaaacgatgatgatgaatttgtaccggaagatggacagaacgaaggtgcagtttgattttttaacccataggaacgatccgtgcgcttatgacgaggaaattctcgctctcggcggacggcttttttatgtgccgagcatcggcagcacaaacccgattacatttgttaaacaggtcaagcgggtgattcaggaaaaaggcccgtttgccgccgtgcacgcccataccgattttcagtcgggatttatcgcgcttgccgctcgtttagccggcgtcccggtgcggatctgccattcgcacagtacgtcgtggcgggggcgggcgtcgcggcttgccgggatgcagctgtttgttttcagacggctgatcacggcaaacgccacggcactgtgcgcctgcggaaaagaggcgggccgtttcttattcgggaaagaaaaagacgtgcatcttttgccgaacggcattgatctcgacttatttgccggcgggtgcgcggacacagaagctgaaaaaaggaagcggggcattgcagacggccgtttggtgatcggccatatcggccgctttacagaagaaaaaaaccacgaatttctgctccggctggccgctgatatgaaagagcggggcatcggcttacagctgattctcgccggagacggtccgcttcgcaccgatatggaaaatctggcggcgaagctggggcttgatgatgatgtgcgttttatcggcatagaagaccgcgttcatgatctgctgaaaacgctggatgtatttgtcatgccgtctctttatgaagggctgcccgtcacgctcgttgaagcgcaggcctccggggtgccgtgcgtgatatcagacggcataacggaagaagccgatgccgggctcgggctggtcaaaaggctcagcctcaaagaaccgccgggacaatgggcatccgcggttttacgggcagcagaggcggcaaagcctgacggggcgcgtattaaagaaaccctcaggcggctgggatatgacgcgggagaaaatgcgggggctgttatgaagctttacaatatgaattggaaaaaggaacagtaacgaatgattgtatatgtagtcaatatgggaattgtttatatttggtcatggttcgcgaaaatgtgcggcgggcgtgatcaatcgctttcgaccggataccggccgaatcagctcgtcatgctcgttccgctgctatcgctggtattggtctccggtttgcgctacagagtcgggacggattttcagacgtacgcgctaatgtacaagctggcgggaaattacggcagcatttgggagatcttcgggttcggagcgaaaaaagcagccgttgatccggggtttacggctctcatctggctcatgaattttatcacgaaagatccgcaaatcatgtatttcaccgtggcggtcgtgacatgcagctttattttaaaggggctcgttgagttcggccgtccgtttgagctgagtgtatttttgtttttgggcacgtatcactattacgcttcctttaacgggatcaggcagtatatggtggcggccgttttgttttgggccgtccgctacgtgatcagcggaagctggaagcgttatatgtcaatcgtgctgctgtgttcgctttttcattcctcagcgctgattatgattccggtttattttctcgtcagaaaaagagcctggtcgcccgcgattttcggactgtcggcattgtttcttcttatgacgtttctgtatcagaagttcatttcgctgtttgtcgtcgtgctggaaaacagctcgtacggccattatgagaaatggctgatgacgaatacgaacgggatgaacgtcgtgaaaatcgcggtgctgctgctgccgctgtttttggctttctgctaccgggagcggctgcggaagctctggcctgacattgatgtcatcgtgaatttctgtctgctcggcctgctcttcggtcttttggcgacaaaggatgttatttttgcccggtttaatatatatttcggcctgtaccaaatgatcctgatcccttattttgtgaggatttttgatgaaaaatcaaatgcgctgatttatatcgccattattgtctgttattttctttacagttacttgcttatgccggtcgattcgtctgtgcttccgtacagaacgattttttcccggtaatggacactggaggtttatatggaaacacccgcggtcagtttattaattgctgtgtataatacggaaacttatttagaaagatgcttagattcattgctcaatcagtcgctcgccaatatcgaaatcgtggccgttaatgacgggtcaacggatcaaagcccggcgattcttgaaacctatcagaagcgggatgagagaatcagggtcgttcatcagcaaaaccgggggctcggcgcggtccgcaacaagggcatcgaggcggcgcgcggcgaatttatcgcttttattgatgcggacgactgggttgaacctgattattgcctgcgcatgtatgaaaaagcgaaggctgatcaggctgatctcgtgatttgcgaatatgcggctgaatttgcggatacggggaagaccgccgtttcaacgatcgcttcagcgtacgagggccgcccgaaacaacggtacctgaaagatttatttgaaggaagagtcagcggcttttcatggaacaagctgtacaaaagatccatgatcgagcatcatcagctgcgctttccgcttcgtgatgagctggagcacgtggaggatcagtatttcagcctcagggcgcatgttttcgcaggtgcggtctcgtacgtggatcagccgctctatcattatcggattcacttgacttccattgtgcaaagctatcagaaaaagctgtttgactcaggtctcgttctctatcggctgaacgaggcttttttgcgtgaaaacggctgcttacacgaataccggcaggagctggattttttcatcgttcagcacggaacagtctgcctgctgaatgaatggaagcggaataacggcggccggttttctgagaagtggaagaatatcagccggatatgcgctgatcccgtattccgcatgagcctttccaaaacgggaacggcgccgtttgacgccaaacgctcatgccttctgcttttggcgaagctgaagctgattccgttcgtgtcgctggcatcagccgcgtatcagcgggcaatcgagtacaaaatgaaaatcagagggtgaagacatgtcgatacaatctttaaaaatcaatctcgcggaatggcttttgcttaaggtcaaatacccgtcccaatttcatttcggaacgggagcggatggggcggcggggcttacagcggcaagaaaaaagatcattctgacgctgctcccgtcccacgataatctcggcgatcacgccatcgcctacgcaagcaaaacgtttcttgaacgggagtatcccgattttgacattgtcgaggtggatatgaaggatatatacagatcggcaaaagtgctgatcaaaaagcgccaccccgatgatatggtattcatcatcggcggcgggaacatgggggatttgtaccggtatgaggaatggacgcgccgctttatcataaaaacattccggcaatatcggatcgttcagcttccggcgacggctcacttttctgaatcaaaaaagggacggaaggaactgaagcgcgcccgaaaagtgtacaatgcgcatcccgaccttttgttgatggcgagagatgagacgacgtatcaatggatgaagcgtcattttcccggaaaaacagtgctcaaacagcctgacatggtcttatatttggataaaagcgagcggggcatagcgcgggaagggatctacctctgtttacgggaggataaggagagcgcgctgacggctgaggacagaacgatggtaaaagaagctttggccaaagagtacggagagctgtattcctttaccacgacggtcggccggagggtcagccgccatacacgcgaaaaggagctggaagcgctttggaatacgctgaaaggcgcggaagccgtcgtcactgacaggcttcacgggatgattttttgtgcgctgacgaaaacgccttgtgtcgtcattcgttcgtttgatcataaggtgatggaaggctatcaatggctgaaaaacataccgaacatgacattgcttgaacgtcccgaccctgaagccgtaacatccgccgtaaatcggctgctcagcggcaagcatgaggaaggcggttctttgcgaagtgtttattttgccgggctgcgctcgaaaatcagcggtgatgcccaatgaccgcgccgcttgtgagcgtgatcgtgccgatgtataagacagagccttttattaaagaatgcgcggtttctttaacaaaacagacgctgaggaacatcgaaatcattttcgtcaatgacggttcaccggatcagtcaggccggatggctgaacaattcgccgcagaagatgcgagaatccgggtgattcataaagaaaacggcggcctcagctcggcccgcaatgccggaataaaagccgcccgcggccgttatatcggttttgcggacggcgatgattatgtgacggaaacaatgttcgagcggctttatgaagaagcggagaagaaccggctggatatcgccggctgcggttattacaaagaaacgccgtctaaagaaagaacgtatatgccgccgtcccttccgccgggccgcgtcttcacagcggatgaaatgaccgcattgctgacccgcgcgcacgaacatcggtttatttggtatgtgtggcgctatatataccggcgagaagcattgcaagggctgttgttccatgaagatatccggtttgccgaggactctccgtttaacttggcagcgttccgccaagccgcgcgtgtcaaagtgatagacgaagggctgtatatctaccgggaaaatccgcaaagtcttacagaaacaccgtttaagccccgcttagatcacgaactgcaaaagcaatatgcagcgaaaatggctttttatgaggcaaacgggctgacggacgcctgccggagcgatattgatacatatttgtgcaagcatcagattccgatgctgatcgccaacgcatgcgccgccccgcagccgtcacaccagattacggcgcatatcggcagaatcttaacgtatgacatggtaaaaacggccgtgcgcaggacgccgtgccgccataaacagctgctggccggggagcgcgtggtgctcggtctgtgcaaaatgcgccttcctcttcttctgcatgcgtttttcgaacggaaatcgaaagagaaaggcagtgcggaaggagcatgaaatttgccattaatttcggcgccaatgtgacggcgtttttactatcggtgtttttatcagtgtggatgacgccctttattgtgaaaacattaggtgttgaggcttttgggtttgtccatctgacacagaatatcattaactatttctctattattaccgttgcgctgagctcagtcgttgtgaggtttttctccgtcgccgcccacagggggaacagggacgaggccaatgcgtatgtaagcaattatttagccgcgtctgtcgtgatatctctattactcgctgtgccgctcgccgggactgctttttttattgacaggattatgaatgtaccggccgggctcttaacggatgtgaggctgtctatcgtaatcggcagcgtgctgtttatgctgacgttttttatggcggggttcgcgacggggccgttttttgccaacaagctttatatcacaagttccattcaggccgtgcaaatgctggtcagggtgctgtgtgtgctcgctctgtttacgtgcctgccgccgaagatctggcagatccagctttcggcattagcgggagccgtctgtgcagctgtgctgacttttttcttctttaagaaattgattccgtggttttctttcagccgtaaaactttatcattacagacaagcaaagtgctgttttcggccggtgcctggagttctgtcaaccagatcggcgtgctgctgtttctgcagattgacctcatgacggccaaccttgtgctggggccgtctgaagcgggtgtctatgcggcgattattcaattcccgcttctgctcagaagtcttgccgggacgcttgcttcactgtttgcgccggttttgacttcctattattcaaaaggcgatatggaaggtctcctgtcttacgccaataaggccgtgcggatgaacgggcttctcctcgcgcttcccgccgcgttattaggagggcttgccgaaccgtttctggcgatttggctgggcccgtcgtttgtgcagacggcgccgcttttatatattcacgccgcgtatttggtggtcagtctctctgtcatgccgcttttttacgtatggacggcttttaataaacaaaaaacgcccgccgtcgttactttatgtttaggcggactgaatgtcatattggccgtggttctcagcggaccggcacatctcgggctgtacggcatcaccattgccggggctgtctccctcattttgaaaaatgccgtcttcacgccgctgtatgtttcgcatattaccggctttcagaaaaccgcgttttacaaaggcatgttcggcccgttggcggcggccgtatttgcctgggccgtctgccggggtatccggctgttttcaccgcttgacggctgggccggtctgatcgccgcggggcttgccgtatgcataagctatgccgcattcgcttttttcttcatttgtacgaaagaagaaaggcggcttgctttacagaaatgccgaaaagtgaaaggagctgttcagatttgaaggtgaaacgtgtatttgatatagcggccgcgacgctgttattgtgcggcgcgagtgtcattcttctcttcgccatggcagccgtcagatgcgccatcgggtctccggtattgttcaaacagacgagaccggggcataacgggcgtccgtttacgttgtataaactcagaacgatgacggatgcgcgtgatgaaaacggtgtgctgcttccggatcatctgcgcctgaccaaaacgggaaggctgatcagaaaactgagcatcgacgagcttccccagctttttaatgtgctcaaaggcgatatcagtctggtcggcccccgccctttgctgatggattatctgccgctttacacggcggagcaggcgcggcggcacgaggtgaagccggggattacgggctgggcgcaggtcaatgggagaaacgcgatttcatgggaggagaaattcaagctcgacgtgtggtacgtcgacaaccgcacctttcttctcgacttaaagattctgcttttaacagtgaaaaaagttctcgtgtcagaaggcatacaccaagccggccatgtgacggcaaagcgcttcacaggcagcggagatatgtcatcgtgaaaaaggtcgtgctgatcggaaacggcggacacggaaaagtcgtgaaggaaatcgtgcaggcccgttccgatatggagcttgcgggcatattggacgacggattcagcggttttaccgctcggaacggtttatatacgggccggacggaagacgtgcacatgcttcggaaactcgtccccgaggccgtgttcacgatatgcatcggccgcaacggcgtcagaaagcagttcgctgaaacgcttgggattgaagctgccgattatgcttcactcattcaccccggggcgatcgtcagtgaaacggcttccgtcggacacggaacggttgtgatggcgggcgccgtcattcaggcgggcgctgacatcggcgcccattgcatcatcaatacgggggcggttgccgatcacgacaatgcaatcggagattacgtccatctttcaccgcgcgcggcgcttgccggcggagtgaaagtcggggaaggaacgcacatcggaatcggcgcgtccgtcataccgcagatggacatcggcccttggtccgttatcggcgcgggggctgcggtcatcagcagaattcccggccatgtgacggcggtcggcgttccggcccgcgtcatctcccctatccataatgaaaaaggatgatttcatgcaaacaaacaaacggatttatttgtctccgcctcatatgagcggaaaagaacaggaatacatcgcagaagccttccgaaccaattggattgccccgctcggtccgctcgtcaattcgtttgaagcgcggctcgcggaatatgcgggagtgaaaagcgcggcggccttaagctcgggaacggccgccatccatcttgccctgcggcttgcgggtgtgaaaaaaggagacgttgtattttgtccttcctttacgtttgtcgccacggcgaatccgattgtgtatgagcaggctgagcccgtttttattgattcggaatgggagacgtggaatatgtcgcccgctgcgcttgagcgggcgctccgggatgcaaagcggcgcggcagactcccgaaagcggtgatcgccgtcaatctttacggccaaagcgcgaaaatggatgaattaatgagcctttgtgacgcatacggcgtctgtctgattgaagacgctgccgagtccttaggatcaacatataaaggcaggcagagcggcacgttcggccgtttcggcatttattcctttaacggcaacaaaatcattacaacatcgggaggcggcatgctcgtgtctgacgatgaagccgcgattgaaaaagcgaggtttcttgcgtcacaggcgagagatgccgccgttcattaccagcacagcgagctcggttacaactacaggctcagcaacattctcgcgggcgtggggatatcgcagctggaagtgcttgaagatcgcgtccgggcgaggagagaaatctttcaccggtatcgggaagcgctcgaaacatatccgggcatccgcatgatgccggagcttgaaggaacggtttcaaaccgctggctgacggctctgacgcttgataacggcgtgacgccggaagaagccgtcgcctgtcttgcggaacagaatattgaggcccggccgctgtggaaaccgctgcacacgcagccgcttttctcatcttccgtcttttatcctcacagcgaccatgagcgtgtctctgagaaccttttcagccgagggatttgtctgccgtccgggtctgacctgtcttctgaggagcagcagcgtgtcattgacgcacttgcgcaactgtttgaaacgaaaggggagaaaacatggacagccgccatgttatgagccgattaaaagagacgctgacgggtctgctcagcgttataccgccgcaatccgacatcatatatgccgactatcccctctacggaaatgtaggggatttattgattatgaaagggacggaggcgttttttaaagcgcacggcatccgcgtgaaacagcgctggaatcccgacaattttccattcgggcgccgggcggacaaaaagacgatcatcgtctgtcagggtggcggaaatttcggggatctctatccgtactatcagacgttcagggaaaaaatcgtcaaatcctttccggaaaacaggatcgtcatcctgccgcaatcgatttattatcaggatgagacacggctgcaaaagacatcggcgctttttgcggagcacaaggatctccacctgtttacgagagatcatgtgtcatacgagactgcgaaacgctttttttcggcgaatcatatcgggcttatgcctgatatggcccatcagctgtatccgatcgcggcgtcagcggttccgtcacgcggcaggctttattttatccgcacggatggggaaatcaacccgaagctgcaaaacaattcttccgttaaaagctgtgactggcaggatgttctgtcagcaagcgaccgcaggggaatcgcttttttccaaacgctgaatgttttgaataaaaaagcgggaaacccgctgccgattgcgcggttttggaaccgctattccgatttcttaacgaaaaaagcggtcctgtttttcagcaggtacgaatcggtggaaacgtcaaggctccacggccacatcctgtcctcgcttctcgggaaaccgaataccgtcattgataattcatacgggaaaaacgcgaactattattacacctggacgcacgaagcgccggacgtccggctgatcggtgaaaccgccggcacgaaggaaaaccttccgctttgaatgagcggaaggtttattttgtttctccgcgttttactttgttgtacgcctcatccaaatgctgaattcttttgagcacaaccgagtttttcgtcagctgatcctgtacaagggttgagacgacggagcggtaatagctgttcatcgcatgaattcggtcttcattcggattcatttcaatgtgctgtgtaaagttttcaataaaatagggaacagaaaaaagttctgacatctataaagcaactccttttaataagtatatacggtatgaaaccaatcatgtacaatgaaaaaaggggagtgagcatgatggatatcaaacttcagcaaacacaaatgttaaagcctcaattaacgcaagagcttaaacaggccatcacattactcggatacaattccgcggaactggccggatatattgatgagctctcactggaaaaccctctgattgaacgaaaggaaacagacacgccgccactatcttaccataaaacaaataaaaacaggatgaaagaacgggacggaagccagcagatcagacttacccgcaaaacgctgcaggattcgctcaaacagcaagccttagacatgaagctgtccgatgatgagaaaaaaattttcaattatctgatacattcattggattcaaacggttatttaaaagaggacataccagccgccgccgaccatgtatccgcttcacaagaggagacggaagcggttctgaaaaagcttcaatcccttgagcccgcgggaatcggcgcccggtctttgcaggaatgcatccttcttcagctccgccgtctgcccgagcggaacgaacaggcggaatggattgccgaagcctattttgagctatttgcaagaaagaattggaaagcgcttacacttaaaacgggcattccgcttaaagacattcaggacatcgctgacatgatcagcgcgcttgatccgaggccggggctccgttatgcgcatgaggagccgggtttttacgtagaaccggatattttcatcacggtgaaaaacggcatcattcaagcgcggctcaacagccgttcgtttcctgacatccagcttcatgcccattatcagccgctcttgtcagccgccgggtgccgtgacacgaaaaattatctgtcggcaaaatatcaggaatggcgctggctgaaccgggctttgtcgcaaagaaaacaaacgatcacgagaattatcggcgtcctgactgaacggcaggaatccttttttctcacaggaaaaagcggaatgcagccgctgaccttaagagaggtggcggaaacgctggagctccacgaatcaacgatcagccgggccatcaaagggaagtacgttcagacgccgtacggactgtatgaaatgaaaacatttttctcggcgaaagctgaatcatcgggggacggcggcgcctccaattatgccgtaaaagcgcatctggaagcattggtccgtaaagaagataaaaagaaacctttttcagaccaaaagcttgccgatctgctgcatgaacaatatgacatccgaatctcaaggcgcaccgtcgccaaataccgtgaccaattaaatattccgccgtcatcggcgagaaaacggtacagctgaaacctccccgagccaaaccccggggaggttctccgtgttacgggatcatccatgaaaacagatgatgctgtaaaaatgtaatgagacagacgagcagaagcaaaaacagactgtgcttaatcgtaaagcggaaaaggtcggcttccttgcccgccagaccgacagcggcacaggcaaccgcaatggattgcggagaaatcatttttccggtgacaccgcctgatgaattggcggcaacggagagaaccgggtccatcccgacagatagcgccgtcaccttttgcaatccgccgaacaataggttggccgatgtatcagagccggtaataaatacgccgagccagccgagcaccggcgaaaaaaaggtaaacatcgcgcccgtcatggcaagcgcaagaccgagtgtcgtgctcatgccggaagcattcgtcacatatgcaaagccgacaacagaaacaatggtcacgaccggaagcgttaactctttcaccgtttctataaacgcttcgccccacgtcttccacgacatgccgagggcgaacttggagatgacggcggcaatcagaatcgccgttcccgctgaaccgaaaagctcaagtttgtacacggcttcaatcggcgtgccgtccgcctgaagaatctgctgatttacaaatgggacgggaggcgtgaaggtcaatgctttcccggctgcattcagccaggaaagccacattgacgttccttcataatgaccggttaaagcagccttcacgccgggaatcccccaaacggatatcatggccgtcagaagaaggaaaggagaccacgctttaaacaccgcggcgcccccgtacttgatcggcgcccggtcagcggccgctgctgattcccgttctgccgcgaaacgaaaggccgttttcggtttccaaaatttcaaaaatacagcgagcgcggccatggaaacaagcgccgacagcacatccggaagctcaggccctaaaaaattcgagcttgcgtactgcacggccgcaaaggagacgccggaaacaagaatggccggccatacttcaaaagcctttttaaacccgctcatcaaaatgattaagtaaagcggaataaagacggataaaaaaggaagctgccggccgaccatttgggaaatttccattgccggtatcccggtcggaccttcgacggcggtaatcggaatgccgatcgcaccgaaggcaacgggcgccgtattggcaatcaggcaaattcccgccgcatacagcggctgaaaaccaagtccgacgagcaaagcggccgagatcgcgacgggagcgccgaaaccggcggcgccttctaaaaatgccccgaatgaaaaggcgatgagcagcgcctgcaaacgccggtcatctgtaattgagagcaccgaactccggataatctcaaactgtcccgttttcacggtgattttatacagaaagaccgatgtgacgataatccagccgatcggaagcagcccgtacaccgctccctgagaagcggacatcaccgctttttccgccggcatgccgtaaacaaatacagcgattaaaagtgaaacggctaacgttaaaagccccgctatgtaccccttcatccgtttcaccgcaagcgcccaaaaaaagaagataatcggcacgagcgcgcaagctgccgataaaagcaaatttccccctaaaggagcgtacccctgtgtccattgcatccctaaaaaacccctccttatgtcatgtaaacgattactttttatgataaggtcatctgatgaccgggttaattagcattatattttgaaagttttgaaagtacaatacttttcttgaacaaattgtctgaacctgtcggctacacaaaaaaagaagtataatagacgataaacatcaagattcacaagtgacggggtgatcgcgttgaaatataaacaaattaaaacgaaaaaaatctacgaggaagtcgctgacgcattgctggagaagataaaagcgggcgagcttaagccgggggaaaagcttgattctgttcaggcgctttccgagagttttcaggtcagccgctcggcggtcagagaagcgctgtcggctttgaaagcgatggggctcgtcgacatgaagcagggagaaggcacatacataagagaatttgagccgtctcatgtttcccagccgctttcttccgccctcttgatgaaaaaagaggacgtcaaacagctgctcgaagtcagaaagctgcttgaactcggcgtcgccgccatggccgctgaaaaacgcaccgaagacgatttacaaaaaatccgccaagctctcatggagatgaaagacattgacggagacgaagaattgggcgaaaaagcagatttctcctttcacatggcgctggcggaagcatcacaaaacgggctgcttaagcatctcatgaatcatgtctccgcgctccttttggaaacaatgagagaaacgagaaaaatttggctgttttctaaacgaacgagcgtgcagcgattgtatgaagagcatgaacgcatttacagcgccgtcgccgccggagacacggatgaagcggaagcagcgatgacggcgcacctgacgaatgtggaagaagtgctgggggcttattttgaagaaaatgtatagaagctgacttgtgaaaggggataacatcacatgcaggccgaatcttttttttctgaccatgtaaagaaagctctgacaaatgatcctcccggggaatggatgccggcagttccgaaagcgtgcatccctctgcattccggctatcccgatcccgcgctcgttcctgataaggagctgaaagaagccgcctcccgccttctggatgaggagcgtgatctgccgctgcattatataggaagcccgaggacggccgttttaaaaaagcagattcaagaacggttagccatccgcggcattcactgccgggacgatgagctgatcgtgacatcaggcgcctgtcaggcgatagatctggctgcgcgggttttcctcgatgaacaaaccgccgctgccgttgaagctccggtctatatggaagcgctcgagatttttaaaaattatacaccgcatatcatgagcattccgacagatcaagagggtctgcaaacagaaacattagcgtttatgcttgaggaaagaaaacgaaaagggcttgtgcttccccgtcttctctacacgatacccgcttttcagaatccggcgggaaccgtaatgtcatcgaagcggagaacccgcctgcttcagcttgccgaaacgtatgattttctcatcttggaggatgatgcatacggcgagctcggattcaccgatattccgccgcccttgaaagccatggatcaaaacggccgggtgctgtacgccggttcattatcaaaagtcatcgccccgggtatgaggatcggctggattgcaggggacgccgcattcatcacggcattgtcatggttaaaaaaagacttaggccatccgttttcccaagcggtgaccgccgtctatctggaacaaacgaatattgaagaacggctcgccgccttgcgggaagcatatcgaagcaaacgtgatgttttgctcgccgcatcagcgcgatatcttccggaatccgcatcctggcacgtgcctgaaggcggttactttgtatgggtgaaagcgccgggggctgatacgtccgcactgctggcgagggctctgtctcacggcgtttcctatgtacccggaaaatatttttttccgcatcaggaagacggtgccgaatatctccgcctgtcgttcagttttcccggtaaagccgcgataaaagagggtgtgcaaaaactgggacacctgctgaaaaacgggatctagagaagcatgggaagctttcaggcttctcttttttttacccttcagcgcatcgggcgaaaggatttttcagaaaaaccttccaatccatattcagaatagtgtaggatatttatagagctttccaaaaacaggtcatcagatgaccggatcacatactgaggatgaaagaggggttcatcatgaaagtctcattatttgtcacgtgccttgtggatatgtttcagaccaatgtcggaaaggcgacggttgaggtgctggaacggctcgggtgtgaggtggattttcccgaggggcagatttgctgcgggcagcccgcatacaacagcgggtatgtgacggatgcgaaaaaagcaatgaagcggatgattgccgcgtttgaagaagcggagtacgtcgtcagcccgtcaggttcctgtacgacgatgttccgtgaatatccgcatctgtttcaggacgatccgaagtgggccgcaaaagcgcagcagcttgcggacaaaacatatgagttaacggattttatcgtcaacgttctcggggtggaggatgtcggggcggtgctgcataaaaaagcgacagtccatacatcgtgccacatgacgaggctgctcggcgtgtcggaggagccgatgaagcttttgcgccatgtcaaggggctcgagctgaccgcgcttcccggaaaacaccaatgctgcggattcggaggaacattttctgtgaaaatggcgcaaatctctgaacaaatggtggatgaaaaggtcgcctgcgtggaagacacggaggccgaggtgctgatcggggcggattgcggatgtctgatgaatatcggcgggcgtcttgaccgtaaggataaaaacgtcagagtcatgcacatcgcagaagtgctgaacagcagataagacgagaaacaacaagggggtaaaatcatggcgatgaaaatcggtaccgccgcttttaaagagcgggtatcagaaggaatagataatgagtttatgagaggagccgtctccggagcgcaggaacggctcaggataaggaggcttcaggcggccgaggaattgggaaactgggaggattggcgttcacatgcggaagaaatcagacagcatgtgctggacaatcttgatttctatttggaacagctcgccgaaaacgtcgccaacagaggcgggcatgtctttttcgccgaaacggcggaagaagcgtcctcctatatccgcgatgtcatccggcagaaaaacgccaaaaaaatcgtaaaatccaaatccatggtgacagaagaaatcaatatgaacgaagtgcttgaggaagagggctgtgaagtcacagaaacggatctcggcgaatacattctccagattgacgatcacgatccgccgtcacatatcgttgctcccgctcttcacaaaaacaaagagcagatccgtgacgtgtttaaagagagactcgaatacaaacagacggaaaaaccggaagagctcgtcatgcacgcgcgcagcgttctccggaaaaaatttctcgaagcggatgtcggcatcacgggctgcaactttgcaatcgcggataccggatcggtcagtctcgtgacaaacgaaggaaacggccgccttgtgtccgcgctgccgaagacgcagatcaccgtgatgggaatggagcggatcgttccttcattttctgagtttgaagtgcttgtcagcatgctgacgagaagcgcggtcggccagcggcttacaagttacattacggcgctgacgggcccccggcagcaaggagaagctgacgggcctgaggaatttcatctcgtggttgtggataacgggcgttcccgcatactcggcacggaattccaatcggtgctgcaatgtatccgctgcgccgcctgcatcaacgtctgtcccgtgtaccggcatgtcggcggacactcgtacgggtccatctattcgggtccgatcggcgccgtcttatcgcctcttctcggcggatatgacgaatacaaggagctcccgtacgcatcttccttatgcgcggcctgtacggaagcgtgtccggttaaaattccgctgcacgagctgctgctcaagcatcggcagaacattgtggaaaaagagggcaaagcgccgatcagcgaaaaactggcgatgaaagccttcgggctcggctcgtcatccccgtccctttataaactgggatcgaaatgggcgcctgccgccatgacgccgtttacggaggatgacaaaatatcaaaagggccggggccgttaaaagaatggacggcaatacgggacttcccggcgccgcataaatcgagattcagagattggtttaaagaccgggaaaaacaaaagggggaagaatgatgatgaaagggacggttacacatcaggaatcctttctaaaccggatcgccggaagtctgggcagagagcgcaggaaatcaggcgtgtccctgcctgaatggaagtatcagcctcaatatcaaacgcatgcggactgtacggaagacgatcttgtcacgatgctgaaagaccactgcgtcaacattcataccgaactgatcgaaacggatgcagccgggctttacgacgctttgcgcacgcaggtgaaccgctttgaaggggggcctgtcatcattccgaacgacagccggtttgaaatgtacggcttgcagacccttatgacagaagagtggccggacgaagggattcccgtttgggaatgggacgcggaacaaggagcgaaaaatattgaaaaagcggaacaagcgaatgtgggcatcacattcagcgagatcacgcttgcggaatcagccaccgtcgttttgtatgcgtcagagcatgccggccgttccgtcagcctgcttccgaccacctatatcgcaatcatcccgaaatcttccattgtgccgagaatgacacaggccagcgatatactgaaacagcagatcagagacggcgtcaccgttccttcctgcatcaactatattaccggaccgagcaactcggccgatatcgaaatggatttggttgtcggcgtccacggacccgttaaagccgcttatatcctcgtgaatgaccgataaaaaaacaaaccccggtttgcggccggggtttgtttttatataaacgcgttaatgatcatgataaaacagatcgcactgacagaaataatcgtttccatcgccgtccatgtcaggaacgtttcttttaccgtcattccgaaatactctttaatgagccagaaaccggagtcattgacatgtgacagaatcaaagagcccgctcccgttgccaaaacgagaagctcgctgctgacgcccggcatgacagatgcaatcggagcaacaatgccggccgccgtcatcatggcgacagtcgctgaacctgtggcgacacggatgaccgccgcgatcgtccagcttaaaagaacgggagagaagcttgagtgcttcgccatgtcagcgatatacgtgccgacgcctgaatcaatcaggacgttgttaaaagcgccgccggctccgatcacaagcagaatggaagcgatcggtcccagacagtcattgctgaattttaaaatgctttccctgtcaaagccctgataaaaaccaaggctgaaaaaggagtaaaccgtggcgatcaaaagcgccgtgacagggtcgccgataaatttaaaagtttcatagagcgtgcttttttccggaagcgcaatttcggcaagcgttgccataagcatcaggatcaccggtaccaatatcgtaaacaatgtatttgcgaatcccggaagcttgcgtttttcattccgttcaataaattgttttttcaacagttcgggaacgggtttatgaatgcgcttaccaatccattttccgtaaagcggccccgcgatgatggcagtcggaataccgacgattaaagaatacaaaatcgtttttccgacattggcgtgataaatgccgacagccgccatcgccgccgggtggggcggaaccaatccgtgcacgacggaaagtcccgcaaggagcggaatcccgatcgtcactaatgaaaccccggtttcaatcgcaatcgtaaacaaaagcggcacgagcaggacgaagccgacctggaaaaagaccgggatgccgacaataaaagcgacggccatcatcgcccaatgcactttctttttgccgaagcggccgatcagggtgtgggcgatccgctccgcaccgcctgattcagccatcatttttccgagcatcgtaccgagggccagcacgatcgcaagcagagacagcgtattgccgagcccggttttcattgaagtgataatgtccggcagattcatgcccgttgcgaaaccgacaaggatggatgtaatcaaaagactgataaacggatttaatttagcgaccgtaatcaataagagtaaaacgataatagcggcaatgacaataaacagtaacatgaccttttcaccctttctttcaaagaagaattaacggctttgtttgagctgaaattcactgatgacgtcaaattcatctttgagcttgtcatacagccgctcgtataagtaaaacagctcaatatatgtttcgctgtttttgacgttcggttcatggcggtgcgaaattctgatccagtcctgaacatcctcgatccgttccatttcgccaaggctgtgcaaagcgagaacggccgctccgagcgcagaggcttcgtaactttccggaacgaggacttcgcgtcccatcgtatcggacaaaatctgcctccacagcggcgatctcgcaaatcctcccgaagcccgcacgtcttttgcggggcccgccaaatctctcagtgcgacaccgattgaaaagacgctcatgatgacgccttccagcaccgctctgataaaatgctcccgtttatggcggaggctgatgccgaaaaacgttccgcgggcattcgggttccaaaacggcgcgcgctcccctgataaaaacggcagaaacagcaatccctcagagcctgcgggcactttatcagcaatatcaatcattaaatcgtacggatcaatgccgagccgcttcgccgtttcaacttccggagaagcgaattcgtctcgaagccagcgcagcataatgcctccgttattcgtcgggcctccgatgacccaatgcttgtcagtcagcgcgtaacagaatgtccgcgctttttcatccgtaatcggcgcatccgtcaccgaacgcacggctccgcttgttccgatcgtaacggccacttcgcctttgccgatcgcgccgactcccaggttggcgagcacgccgtcatttgcgccgataataaacggtgtatccgcatggatgcccatccgtgcagcgatttccggcgcaaggccgcgcagctgatgagtggtcggcacaatgtccgacagctgatcttcccggattccggcaatcctgagcgcttcttcatcccaggaaagcgtatctaatcggaacagtcccgttgccgaagcgatcgaataatcgacgacataagttccgaaaaactcgtgcagaatatattctttaatactgatgaatttggcggttttcgcgaatgtctccttgtcctgttctttcatccacacaattttggaaagcggagacatcggatgaatcggcgtacccgttcttttataaatatcaaaaccgttcatctcttttaaaatccgttttgattgctcggcgctgcggttgtccgcccaaatgatgcttttggtcagcaggccgccgttttgatcgacagctatcaatgagtgcatggcggtgctgatgccgattgcaagcagattgtcaggactcagtccggcctttgtgacggcgcccctgatgcttccgatcaccgcttccaaaatgtgctcaggatcctgctcggcccatgccggctttggctgtattaaatcatagtgaaccgaatgcttggctaacactttgcctcttggtccgaacagaacagctttcgtactggtcgtgccgatatccagaccgataacagcttgggtttccttcataatatatcccgcctaatctgattgaataataagatagatttataatgtatgcccttacaaagtcaattataggaataatttttttataaatcaacgatgaagaagaaaaattttttcataaaattgcctcaattcccgctgtatcggctttctctcttttgaaaaaaatatttagaaaacgattacaaacgtttgtgcgcgatcatttttctgatttgctgcaagttggcgagcgttttctcctgccgcagccgggccgtggcgaaatacagtgtatcaatgaccgacagctgggcaagccttgcggacatcgcctccgttctgaaagccgtctcccttgttgatgtatacagcacaacgtcggaaatctgggtgagcggcgacttttggtagcttgtaatgccgatcgtgccggcgccgagcgatttggccgttttgaccgcgtcgagcacgtccttgttgctccccgaatgagaaatgccgatgactgcgctttcaggaccgagaagacccgctgacatcgcctgaaagtgagaatccgtatgcgcgatgcaatttatacccgtacgcataaatttatgatacgcgtcagtggcgatcagcccggaaccgccgtttccgtaaaattcgattctgtctgcgcggtggatcatttctaccgctttttcaacgtcggccggatctaataattgaaaggtatcggtcagaccggaaatgtttgtgcggaaaactttccggatgatgacttcgatatcgtcgtcggggctcatttcttcatgaatgtgctgcaccggctcctgaacgatctcctgagccagcgcgatttttaaatcctgatagccggaaaaaccgagccgcttgcacagcctgaaaatcgtcgcttcagagcttttcgttttttcggccagctgaatgatggaaaggtgaaccacgtctttcggttccttcacgatatggtctgcaatcgctctcaattttggcgacaaacctttgctggccgcctgaatcttcccgatgctgcttgaattcacaggggtcatactataacctccctactcgaatgtaaacgcatacttttatgataaagcaagtttcaatataaggaaaacagaattttaaaattgttttttcaattttgtgtgtaaaaaaagagaaaaagccgccgatgatagaaagtgaggaggcatctgaatgaaaaaagcatggattctcgtcatatcattcggcattgcgcttgcgctgtttttatacgcaaacacaaaggtgaaagcggaaagcatggcgccggaaagcaaagccttgtgtccggatttcagctgaaatttccgaatcaccgggaaggacaatagacggaaaaaattagtattgactttgaaaatagaagactgtatattatgttactatattcagaaaataaaaactcaagagattcatttaacataaaacactgtgaacgggagcagtaagagaatccagtcagaaaaagagagccgcgggttggtgaaacgcggactgattgttctttgaactcgcccggaagtggcagggcggaacggaattgtcggaatattccctatgtcctaacggctgaccttcgttaaaaggtttttaagctggattccggatattcgggatcaacaagagtggtaccgcggctgcctgaggcacgccgtctcttttcctaaagaggcggcgtgcttttttatgtgatgaacactttttgcgagagggcgtgtgatagatggaaaaggacaagcaaacgttaaaacggacgatgtcgtccagacacattatgatgatggcgcttggaggcgcaatcggggccgggctctttaaaggcagcagcacggcgattgatgaagcggggccgtccgtgctgttggcctacctcctcggcggaatcattctgctgtttattatgcaggggctggccgaaatggccgtcagaaacaaacatgcaaggacgttccgtgatttggttcagcagtctctcggttcgtacgctgcatactttttagactggatctattggaaaatgtgggtgctcaatattgccgcggaggcggtcgtagccgccattttcattcaatattggctgccggaatgtccgatatggatactggctttgatcatttccatcgtggtgacggtcgtaaacatgctttctgtgaaactgtttgccgagacggagtactggctcgcgctcattaaaattacggtgattgtcatctttattttatgcggaattctgctattatttttctcattcggcaatcacacggcgccggggctgtctcatttaacggatcacggagggtttttcccgcatggagcggggggcgtcattacggcgatgctcgtcgtgatctactcatacggcggaacggaaatcatcggcgtcacgctggcggagacaaaaaaccccgaaaaggtgattccgaaagctgtccgaagcacgttaacgcggattgtcgctttttacttgctgccgtttttcatcatcgtcagcctgattccttggaatcaagtcaacagcgttcccgaaagcccgtttgtcatagtatttaagatgatcggaattccgggtgccgaccatattatgaatgccgtcattcttcttgcgattatctcgtctatgaactcgggactgtacggatcatcccgcgtcttatttacgcaggcttctgacggccgggtgccgaaaatcttttcaaaactatcgaagaaaaaggttcctgtctatgcgattctgacttgtacgtcatttttatatgtaggcgtcctgatttctttattcgcaggaagccggacgtttaattatttgatgggttccctcggctataccgtgctgttcatctggctgattatcggattcgcccatttaaaatcaagaaaacattcaacagaacagccggcttattacgtcaaatggttcccgtacacgacatggttcgcggtgcttgcgcttttggccatcctgatcggcgtaattgcgacgacgtccatcgtcatcacatgcatcactgcggccatctacctgctcattacggctgcgtatctcgtgaaagggagacgtcaataaataaaaaaactcttgccccgcggcaagagtttttttaatgaacggcctttttttctgcggccagagcaggtgttttcagtttcttcggtgttatattcacaaaacaaatgcttgtgacgatcagaagcagtccggctaaaaggctgacggtcagcggctcatgcagaaatatcgagctgacgacaatggatatgagcgggatcaggaaggtgtaagaggcaaccttgcttgcttcccctgaaccgacaagcgtaaaaaaggcgagccagccgagtgcgatgacaaataccgaaatgaacagaaggctgagaatgaacggagttttccattgaatcgctgaaaagctttctgaaaaatggccggagctgacaagcagcacgccgccgatcagaagctgaagagcgaccatccagatagagtccgcgcgtccgcccgttcttttcacatataccgtgccgagcgcccagctgaccgcggagcccagagccaaaagaatgccggcgatggaaatatggcctccgaaaccggctgcgctgatgacggcgacaccggcaaagcccagaataagaccggctatttttaaaggatacatcgattccccgagccacagccaagaaaaaacgcccattaacaccggctggaaaaacacgatggctgaaaataagccggcatgcaggtaattcaagccgaccgtttgcaggccgtaaaataaagtaatatttaaaatggcagaaataagatagatcggccacgtttctttaaaacgcagctttttaaaacggggcagcgccaccattaataatagaagtccgccgatcagcgtgcggattccggcaaacagaagaggcggcgaataggcgagcgcggcttttgtcagcggccagttaattccccataccgtgactagaaacgccagcataagagccgtctgtattttcgaaagctgtttcacgtcgttcactccttgtagaacaattccatcatatgatacggtaatcagtaagataaataaaatgaatcttttttataaggagcataagtaaaacgttatgacgattacacaactgcgggtttttgttcaaatcgctgaaacgggaagctttacaaaagcggggcaggcgctgaatatgacacagcccgccgtaagccatgccatctcggcgcttgagtcagagctcggcatcaagctgatcatccgcgagcgccgcaacggcgtaaggctcacggacacgggcggaaaaattctcgttcatatcagagaggtgctcaaaggcatagaaaaagccgagcagctggcggccgcggaaagagggcttgaacagggaacgattcacatcggcacatttccggccgcttccgcttatttcattccaaaactgatcagcgtgtttaaaaaacggtatccgaaacttgagttggtgctttatgaaggaacggttaacgaagtaaaggaatggctccgctcccgggtaatagatgtggggatcactctttttcctacggaagacatggaatatctgccgctgaaaaaagataaaatggccgtcgtgcttagaaatgatcatccgctttgcagctgtgagtcaattactctgaaagatcttgaccgccagccgatgatcatctgtgacggaggatacgaatcaccgtttattgatatgtttaaggaggcagggtctgtgctgactgccgcattcactgtttacaacgtcaatacgtccatcagcatgatcaaagaggggctgggaattgcgatattatcacaaatgtctatgtccggaatatcactgccggaaaatgtcgtgacaagggaactcaatcaggcggtgtaccgtgatgttctgcttgccgttccttctgtaaaagaggcttcattggcggcaaaactttttattcaaatcgcgcaggagctcacaaagaatgaataaaaaggccctaatgatcttagggccctgaatcttatcggttaattttaaaagagtttgtcgtattgacaagttttgaaccgctgaacgtagctttgacacgataataacctgtcttgcatccttttaaagagaatgacttagtcacccttactgagaaagaaaaggttgtttttttgcaagtcgtccatttctttccggactttcgctgtaagtataggtttcctttaaaggttcgatctgacggatacgctgtactgagagtaaaatcgacacttttcgcttttttcgtgtagtaggaggcatcggtaaatccgcttacatttaaatgctgctgagtgccggaataaaagtctgcggcatatgccttatcggtgtttccggtaaagaagattgctgccagtaaagctgttgtgagtgccattaagatttttttacgcatatagactatgacttccttcctattcaatatatgacatatgttaacattattggttctgttctttcaatgatatcttttcatttttatatcattctaggctcttcatatctgaatgtaatagattcattcatacagagttcactagtgacgaccgctgactgattgttcgaagatcatcgaatcaaattgtttaactcacgggaaaagctgtggtaaggtgtgtggtagagaccttgtttaagatctgcttacactaaaccataaaggagaaaacgatggctgaacatacattgaaagatactgcgttttccgtattgaatttatcgccggtcgtacaggggggaacggttgctgaatcgttccgcaacagcatggatttagcgcaccgcgccgaggagtggggctataaccgctattggctggcggagcatcataatatagaaggtgtcgccagctcggcaacggcggtgctgatcggccacatcgccggcggcacgaaaaaaatccgcgtcggttctgggggcattatgctgccgaatcattcgtcacttataatcgcggagcaattcggaacccttgaaacgttatatccggggcggattgacctcggactcgggcgtgcgccgggtaccgaccaattaacggcgagggccttaagaagaaacataaacagcggggaggatttcccggagcagcttgaagaattgagaaattacttcaaaccctcaggcaatgtgcgcaatcaagtccgcgccattccgggcgaagggctggacgtgccgatctggcttttgggatcgagcggcttcagcgcgcgtcttgcgggagagctcgggcttccgttcgcctttgcggctcacttctcaccgaaaaacaccgtgcccgcccttgagctgtaccgaagctccttccgtccgtcagacgtactggatcaaccgtacgcgatggtcggcgtcaccgtcattgccgccgatacggatgaaaaggcggagcatctggcgacatcgcattatcaaagatttttagacctcgtccgcggcacgccgaaccagctgaagcctcctgttgaagacatggatcaaatctggtcgccgtatgaaaaagcgatggtcaatgaacagctcagttcaacgatcgtcggcggaccggagcgtgtgaaggaaaagctggaaagcttcatccggacaacacaggcggatgaaatcatggtgaattcagaaagctttgagcatgccgacagaatgagatcatttgagatcatcgccgaattaaaaaacagctgagcaaaaaaagcaatgtgccgcgcacattgctttttttattcgccgatccgcctgacggaatttcggatgacgagttccggttcatacacgacgtcatccttcttcggttttttatgctctaagcagccgatgacgtattttgccgccgctttccccataatggatttcggatgcttgacagaggtgagcttcacctcggaaatctgggcgaaatgtgaatcatcatagcccatgattgacacgtcatcaggcacctttaagccgaattctctgagaagattaatcgtcttcagcgcaatttcatcattataacaaagaatggccgtcgggtatgatccgctgttttgctcaagggtatgcttaattttttgaagaagcacggtttctttttcttcagtcgtgtaagtcacgatcatgtccggagacggaaaaatcccgcgctcccggtgcgcctgaagatagccgttcatccgtttgacgccctgcgtgtcatccgctttaaagattcccataatgtgcgtgtggccgagggacatgacgtattcgcaagccatcatgccgcctttgacatcattgacggaaaagctcggtgcggccagctccgcataagaggcgttaatcatggcaaacggaatgccgtttttctccaggttgagatagtagccgatgttgggcgtctgcagcgcgcttttcgtaggctcgacaatcagcccgtctatatttttggacagcaggttttcaaggccccgccgctcactttctgtattgttgttggtgctcgtcagcagcatggaatagccctgttcgcttaaataagattcaattcccctgatgatgctcgggaaaatatagtctgatatgtacgttgtaatgacaccgatcgttttgtttgaatgcatggctgatttcgccgtgcgtgaagcgacaaaggtgcctccgccctgaacgctgtacagcaacccctgcgagaccaaatctccgatcgcctttctgatggtatggcggctgaccccgaactgctgcatcagctcattttccgtaggcagcttttcgtccggctgtatttttccctgattcagccatgaacaaatttcttcttttacttgagcatatttcggtagcatatcaattcctccaaaatgtatacggacaaattccagtataacatagtaagccctttcatcaagctgtaaaaataattgacagattgtgaaaaactgcttattctttatttgtacgtactaattttccttatttttagataaaattctttataagtacgtacaaatgtggcggttctgaagaaaacaaagcaactcaagcgccgcactttgttttgtaagcgtttttattctattattcgcgggagggtaaaattcatgaagaatcacccggcaccaattggctcaaatgtacctgtcactcggcagcattcgaagtggtttgtcattctcatctcatgcgcggccggactgggagggcttttgtacggttatgatacggcggtgatttccggcgccatcggtttcctgaaagatttgtaccgcttaagtccttttatggaagggctcgtgatttcaagtattatgatcggcggtgttttcggcgtcggaatttccggatttttaagtgaccggttcggacggagaaagatattgatggcagcggcgctgttgtttgcggtgtcagcggttgtctctgcgctttctcaaagtgtgtcttccttagtgatcgccagagtcatcggcggtctgggaatcggcatgggctcctcgctttctgtcacgtatattaccgaagccgctccgccggccatacgcggcagtctttcctcactgtatcagctgtttacgatattagggatctccggcacttattttattaaccttgccgtccagcagtccggctcgtatgaatggggggtgcacaccggctggcggtggatgctcgcttacggcatgattccgtccgtcatcttttttatcgtgctgcttatcgtgccggaaagtccgcgctggcttgcgaaagcggggcgccggaatgaagccctcaccgtgctgacgcgcattaatggcgagcagaccgcgaaagaagaaatcaaacaaatcgaaacgtctttacaattagaaaaaatgggttcattgtctcagctgtttaaaccggggctgagaaaagcgcttgtgatcgggattctgctggctttattcaatcaggtcatcggcatgaacgcaattacgtattacgggccggaaattttcaaaatgatgggcttcggacaaaatgcggggtttatcacgacatgcatcgtcggtgtcgttgaagtgattttcaccattatcgcggttcttttagtcgataaggtaggccggaaaaagctgatgggggtcggatctgcctttatggcgctgttcatgatcttaatcggggcatccttttattttcagctggcgagcggtccggctttagtcgtcatcatattgggattcgtcgccgctttctgcgtatcagtcgggccgattacgtggatcatgatttcggaaatctttccgaaccacctccgcgcacgcgccgccggtattgcgacgatattcttatggggggccaactgggcgatcggccagttcgtgccgatgatgatcagcgggttggggctcgcgtacaccttctggatattcgccgtcattaatattctctgtttcttgtttgtcgtgacgatctgccccgagacgaaaaataaatcattagaagaaatagaaaaactctggataaaatgaaagcgttttacggcaaaagtccgctgcggcgggcttttgtctgtcaccttcattccgtttctgtatataatgactgtatcaaggagatactggtaaatcctgcgaagaatgtcgaggaattgacctttaacagttgaattaacaatgtcatcctgttaaaataattaaagaaagcagacataattttttttggctatgatgggacgttttttgtcatagcgggacattttctgtccagtatgaataggaaggaacgtttgagtcatgaaccagttaatacaagctcaaaaaaaattattgcctgatcttttgcttgtgatgcagaaaagatttgaaatcttgcagtatatcaggcttacagaaccgatcggccgcagaagtcttgcagccagtctcggattgaccgagcgcgttctcagaagcgaggttcagttcttaaaagaacaaaatctcatcgatattaaaacaaacggcatgacaatgacggaagagggctattcactgctttcgattctggaagatacgatgaaggatgttttaggattgacgcttttggaaaagacattaaaagagcggctcaatctgaaagacgccattatcgtttccggagacagcgaccaatctccttgggtcaaaaaagaattagggagagcggccgttgcatgtatgaaaaagagattttcaggcaaaaatatcgtcgctgtaaccggcggtacgacaattgaagccgtcgccgatatgatgacgccggattcaaaaaaccgcgagctcctgtttgtgcccgcaagaggcggtttaggcgaagatgtgaaaaaccaggcgaacaccatatgcgcgcatatggcggaaaaggcttcaggcacttaccggcttttgttcgttcccggccagctgtcacaaggcgcctactcatctattattgaagagccttccgtaaaagaggtgcttcacacgattaaatcagcgagtatgctcgttcacggaatcggcgaagctagaacaatggcggagcgaagaaacacgcctttggaagatttgaagaaaatagatgacaatcatgcggtgacagaggcattcggctactactttaatgcggacggagaagtcgttcacaaggtgcattcagtcggaatgcagctcgatgacctcgatgccattcccgacattatcgcggtagcgggcggatcatcaaaagcagaagcaatcgaagcttattttaaaaagcagcgaaacacggttctcgtcacggacgaaggagccgcaaagaagttattaagggataacagtccctcaatataaatatctctcacttatttaaaggaggaaataatcatggcagtaaaagtcggtattaacggttttggtcgtattggacgtaacgtattccgcgcagcattaaacaatcctgaagttgaggtagtagcagttaacgatttaacagacgctaacatgcttgctcatcttttacaatatgattccgtacacggaaaattagatgcagaagttaaagttgacggcagcaaccttgttgttaacggcaaaacaatcgaagtttctgctgagcgcgatcctgcgaaactcagctggggcaaacaaggcgttgaaatcgtagttgaatctactggtttcttcacaaaacgcgcagacgctgcgaaacacttagaagcaggcgcgaaaaaagttatcatctctgcacctgctaacgaagaagatatcacaatcgttatgggtgttaacgaagacaaatacgatgcggctaaccaccatgttatctctaacgcatcttgcacaacaaactgccttgcgccgtttgcaaaagtacttaacgacaaattcggcatcaaacgcggtatgatgacaactgttcactcttacacaaacgatcagcaaattcttgatcttccgcacaaagactaccgtcgtgcgcgtgcagcagctgaaaacatcattcctacatcaactggtgctgctaaagcagtttcccttgttcttcctgaactgaaaggcaaactgaacggcggagctatgcgtgtgccgactccaaacgtttctcttgttgacctagttgctgaacttaacaaagacgtaacggctgaagacgtaaacgcagctcttaaagaagcggctgaaggcgatcttaaaggaatcctcggctacagcgaagagccattagtatccggagactacaacggcaatgctaactcttctacaatcgatgctctttctacaatggttatggaaggcagcatggtaaaagtaatctcttggtacgataacgaaagcggctactctaaccgcgttgttgaccttgcagcttacatcgcaaaacaaggtctttaattcatagctcccggaaagggccggacttggttctttcggacagaaacgctataatgaaagcggacaagggaaggggacggactccctttccctttttccatgagaaccggctttcagaaagcgccggattgctgcagaacgtccgcgttttgaagtttccgcggcactttcgttttctgagccgcctgccctggctcagaagacgatctgccccgtgcccggaagctgcaatctgccccgcggcggaagcatcatgaggcggtttcacgtttcacgtttttcgtgctatgcaaaccattttgaaggaggatctcctaaggcatgaataaaaaaacagtaaaagacatcgacgtaaaaggcaaagtcgtattctgccgcgttgactttaacgttccaatgaaagacggggaagtaacagacgatactcgtatccgagctgcgcttccaacaatcaaacaccttgcagaccaaggcgcgaaagtccttcttgcgagccacttaggccgcccgaaaggcgaagtggttgaggagcttcgtttaactcctgtcgctgcacgcttaggcgaactgctcggaaaagaagtgaaaaaagcggatgaagcttacggcgatgctgtaaaagcacaaatttctgatatgaaggacggagacgttcttgtattggaaaacgtacgtttctaccctggtgaagagaaaaacgatcctgagcttgctaaagcatttgctgagcttgcggatgtatatgtcaatgacgcattcggtgctgcccaccgtgctcacgcatctacagccggaattgccgagcatctgccggcggttgcaggattcctgatggaaaaagagcttgacgttctcggcaaagccgtgacaaatcctgagcgcccgtttacggcaatcatcggcggcgcgaaagtaaaagacaaaatcggcgtaatcgaaagtctgcttgataaagtggacaacctgatcatcggcggaggtcttgcttacacattcgtaaaagcgcttggctatgaagtcggtaaatctcttcttgaagaagataaaatcgaacttgcaaaatcattcatggaccgcgcgaaagaaaaaggcgttaaattctatatgccggaagacgttctcgttgctgatgatttctctaacgatgcaaacgttcaaatcgtgccgatctctgagatcccaagtgatttagaagcgatcgacatcggaacgaaaacccgcgaaacgtacgctgaagttatcaaaaacagcaaacttgtcgtatggaacggacctatgggcgtattcgaaatcgacttgttcgctcaaggcacaaaagcagtggctgaagcattggcagaggcaaacgatacatactctgtcatcggcggaggagactctgcggcagccgttgaaaaattcggccttgctgacaaaatgagccatatctcaacaggcggcggcgcatcccttgaattcatggaaggcaaagagcttccgggtgtagctgcgctgaacgataaataaaaactgctataaggaagtggaacagatgagaaaaccaattatagccggtaactggaaaatgaacaaaacactcggcgaagctgtcagcttcgttgaagaagtgaaatcttccattccagcagcagacaaagcggaagccgttgtttgcgcaccagctcttttcttagaaaagctgacttctgctgttaaaggaactgacctgaaagtcggcgcccaaaacatgcattttgaagaaaacggtgcgttcacaggtgaaatcagcccggtcgctctgaaagaccttggcgtggattactgcgtcatcggccactctgagcgccgtgaaatgttcgctgaaactgatgaaacagttaacaaaaaagcgcatgccgctttcaaacacggcattgtgccgatcatttgcgtaggtgaaacgcttgaagagcgcgaagccggaaaaacaaatgatcttgttgccgatcaagtgaaaaaagggcttgcgggtctttctgaagagcaagttgctgcttccgttattgcgtacgagccaatctgggcaatcggaacaggcaaatcttctacagcgaaagatgcaaacgacgtctgcgcgcatatccgtaaagtcgttgctgaaagcttcagtcaggaaactgctgacaagctccgcattcaatacggcggcagcgtaaaacctgcaaatattaaagaatatatggcagagtccgatattgacggtgctttggtcggcggcgcaagccttgaaccgcagtcattcgttcaattattggaggaaggtcaatatgagtaaaaaaccagctgcactcatcattcttgatgggttcggattacgcaatgaaacagtcggaaacgcagtcgcacaagcgaaaaaaccgaatttcgaccgttattggaaccaataccctcatcagacgctgacggcatcaggcgaagcagtcggactgcctgaaggacagatggggaactctgaagtcggtcatttaaatatcggcgccggacgtattgtgtaccaaagcttaacacgcgtgaacgttgccatccgcgaaggcgaattcgaacgcaatcaaacgttccttgacgccatcaaaaacgcgaaagacaacgacaaagcgctgcacctgttcggccttctttctgacggaggcgtacacagtcacatcaatcatttattcgcgctgctgaaacttgcgaaaagtgaaggactgacgaaggtgtatattcacggtttcctcgacggccgcgatgtaggtccgcaaacggcgaaaacttacattcagcagctgaatgagcagatcgaagaaatcggtgtcggcgaaatcgccagcatttccggacgctactactccatggaccgcgacaaacgctgggaccgtgtggaaaaagcgtaccgcgcaatggcttacggcgaaggcccgtcttaccgcagcgcgatggatgtagtcgacgattcttatgcgaacggcattcatgatgaattcgtcattccgtccgtcatcacaaaagaaaacggtgaacccattgcgaaaattcatgacggcgattctgtgattttctataatttcagaccagaccgcgccatccagatttcaaacacgtttaccaacaaagatttccgcgatttcgaccgcggtgaaaatcatccgaaaaacctgtatttcgtctgcctgactcacttcagtgaatctgttgacggatatgtggcttttaaaccggtaaaccttgacaatacggtcggtgaagtattagcacagcacgggttaaaacagcttcgcattgcagaaactgaaaagtatccgcacgttacgttctttatgagcggcggccgcgaagaagaattcccgggcgaagagcgcatcctcattaactcgccgaaggtcgcgacatatgacctgaagcctgaaatgagcgcgtatgaagtgaaggatgctcttgtaaaagaaatcgcggctgacaagcacgacgcgatcatcctgaactttgcaaaccctgacatggtcggccactccggaatggtcgaaccgacgattaaagcaattgaagcagtggacgaatgcttaggcgaagtggttgacgccattatcgctaaaggcggtcatgccatcattaccgctgatcacggtaatgcggacattctgattacagaaacaggcgaaccgcacactgcccatacgacaaacccagtccctgtcattgtgacgaaagaaggcgtgacgctgcgcgaaggcggaatcctaggcgacctcgcaccaacgttattagaccttctcggtgttgaaaaaccgaaagaaatgaccggaacatctttaattcaaaaataagcgtaaatcaaaaggagagacaaactcatgccatacattgttgatgtttatgcacgcgaagtccttgactcccgcggcaacccgacagttgaagttgaagtatatacagaaacaggagctttcggccgcgcattagtgccaagcggagcttctacaggtgaatacgaagcggttgagcttcgtgacggcgacaaagaccgttaccttggaaaaggcgtgttaactgctgttaacaacgtaaacgaaatcattgctccagagcttctcggctttgacgtaactgaacaaaacgcaatcgatcagcttttaatcgagcttgacggtactgaaaacaaaggcaaactcggtgcgaacgcaatccttggcgtatctatggcttgtgcgcgcgcagctgctgatttcttacagattcctctttaccaataccttggaggattcaactcaaaaacgcttcctgtaccgatgatgaacatcgtaaacggcggagagcatgctgacaacaacgtagacattcaagaattcatgattatgcctgtaggcgcgcctaacttccgtgaagcgcttcgcatgggcgctcaaatcttccacagcctgaaatcagttctttctgctaaaggaatgaacacagctgtaggtgacgaaggcggattcgctccgaaccttggttctaacgaagaagcgcttcaaacaatcgttgaagcaatcgaaaaagccggcttcaaacctggcgaagaagtgaagcttgctatggatgctgcatcttctgagttctacaacaaagaagacggtaaataccatctgtctggcgaaggcgttgtgaaaacatctgctgaaatggttgactggtacgaagaaatggtttctaaatacccaatcatctctatcgaagacggacttgacgagaacgactgggaaggccacaaacttcttacagagcgtcttggcaaaaaagttcagcttgtcggtgacgaccttttcgttacaaacacgaaaaagcttgctgaaggtatcaaaaacggcgtaggcaactctatcctgatcaaagtaaaccaaatcggtacattgactgaaacattcgatgcgatcgaaatggcgaaacgcgcaggctacactgccgttatctctcaccgttccggtgaaactgaagacagcacaatcgctgacatcgctgtggcaactaatgcaggacaaatcaaaacaggtgctccgtcccgtacggaccgtgttgcgaaatacaaccagcttcttcgcatcgaagatcagttggctgaaactgctcaatatcacggtatcaactctttctataacttaaataagtaatgtaatggacgccgggagaatatctcccggcgtttttttatggtcccgggcttttccctcctttttcatcatcttcatttggtcaataatattcatttttcccctttttaaaggaatcagtgttcttcaatcgaaagggaagaggtgttaataagaggagggattatgatgaaattttcatttatgtcagccgcggtggcagcaagcgtcatatggggcgcgtctgccgggccgctgtccgaaactcatgcttattcaactgtgaccgcgccggtttttgatgctgatgaggcattggacactatgcatgatctgagtgaaaccatcggtccgcgggaaaccggaactgcgaaagaaaaggaagcggctgaatacatatcgaatcgtctgcgggctcagggcgccagtgtcaaagtacagtcatttccattgaaaaagtacttttcaggttcagtcacagcgggagatcatgaattcccgctccgctccgctgatcaatccgctgttgaaaaagagctcaaaatagaaggcgggatttttgacggcggctgcggatcacgcaatgacgtaacaggagccgaaggaaagattgcagtgatacgcgaaggaaagatccctgtttctcaaaagatcaaacatgccgaacaagcgggagccaaagcagtcattatttataatcagacaacaaaaccgctcgccgtccgtccgcataccgataaaggaatcacgataccggcggcgggtatgaaaaaagaagacggtgaagcattgcttcaggaaaagaaggcagtcattcaatttaaaaactataaaaaccgcacctcacaaaatattataggaacgcgcaaagcggcacaggccaactcttctgatgctgatattatttatgtcacagcgcattatgacagcgtaaaaggcgcgcccggagcggatgataacgcctcaggcacatctgccgttctggaaatcagcaagcaactcaaacatataccgaaagacaaagagatccgctttatcctgttcggtgcagaagaattatggtctgcgggttcatcttattacgtcagtacactcacgaacaatgaaagaaagcacagccgggccaattttaatgccgatatgattgcgactgactgggaagaagcgagtcaaatgtgtgtcacgactcctgacggcaggaaaaacccgagtgtccggtatgctgaaaaagccgctgaaaaatcccggttggtcaagccaaacctgattcagctcggttactcagaccatgtctctttttatgaagcggggattccgtcggctaactggatttggctcagccccgatacacaggagccggggccctggtaccacaccgaaaatgataatatgaaacacatcagcaaagaacggctagagaaagctggagcactcgtttccgcggcagtaactgaggcaatgaaggaataaaaaacaggcttcggcctgtttttttatattattttctgtatattctatcaattaagggagattttctcactcgttaccagatatataccatttaacaggattttattttacaaataaaagaaaaataaatagataatacctaattcacaaaaggatgtaaaactcatttatcaaattttaacttttgttataattgcgatatcgatcgatatttgttttaaattgtaaaaaacaatactcttttctatctattagggggcgaaaaatgaatactgtcacaaaagaagccagcaaccttggtcaaaaacggctgttacatctgattgaaacgaagcaggcgatagtaggcgtgttaggcatgggatatgtgggatttcctcttgcgctggaatgtgtcgataaaggatacaatgtgatcggatttgacaaaaacagtgaaaaggtttccttgttagccgccggaagcagccatattcaagatatagaggacggcagactgaactcggctttacaaacaaaacgctttcaaatcagtgccgacatgtcgctcatccaaaaatgcgacatcattgtgatatgtgtgccgacacccctgaacaaaaaagacaagatccccgatttaacctacatcgacagtgcagttgacagcatgatcgcttatggaaggcagcatcagcttttaattttagaaagcaccacctatcccggaacaacgaaaaaaaagattgccgacagaatggcatcaagccgcggcatgaaaataggaacagacttttttacggcttattctccggaaagaatcgatccgggcaacaggcaatatgaagtttcagatattcctaaagtagtcggcggaaccacacagacttgcacagaacttgcctcagcgttttacaacaccattgttacaagcattcacccggtcacctcacccgaagtagctgaaacagctaaactcctagagaatacttatcgttatgtcaatatagctcttatcaatgaaatggcgcttaattgccgtgaacttgatattgatatatgggaagtcatctgcgcggcggacacgaagccgttcggctttcaaaaatttatccctggccccggagtcggaggccattgtatcccgattgatcctttttacttcaaatggatcgcgaatgaaaaagggctgcagacaaaattaattgatctggcggacgaaatcaattctaacatgccgatttctgtctctgactatgctttgaaactggcgggcaaagacaaatgcagcatcttaataataggggccgcttataaaaaaaatacaaatgacccgcgtgaatcctcagtgtttacgataatggaagaattgatggacaagggatgcgcgattgattatcatgatccgtttatcagcgagatccgcttgaatgacggaagccgcaaacaatctgtccctttcacaaaagaacaaatcaatcagtacgacgtcatcatcattcatacagatcacgatgtaatcgactacagtattttgaaggatgcctcaccgattatctttgacacaagaaatgtatgcagggaaaaatcagccgacaattgcagagttgtcactttataggagggaacggtcattagtaatcgatttatctcttttcacagacctgatatgacaaacgaagaaatcgcaagcgtaaccgaaacgattcagtcgggctggatttcgaaaggcccgaaggtaatcgattttgaaaaaaagctgggagaatgtattggagccgaacacgtcatcagctgtaattcaggaaccgctgcattacacatggctttattggcgctcggtgtgggagaaggcgatgaagtcatcgtgccgagcttcacgttctgttccagcgtcaatgtcatcctgcacgccggagccgttcctgtgtttgcggatatatgcgagaaaagtctatgtgccgatcctgaagatgtcaggaagaaaataacgccgcgcacaaaagcggtaattgcggttcattttgccggctatccggctgatctggaaaacttgcagtccatttgtaaagaaaacggattgtatctgattgaagacgccgctcatgcgctcggtacaaaatataacggaagcatgatcggcactcacggcgatgccgtgtgcttcagcttttatgccaccaaaaatattacaacgggggaaggcggagccctcgtcatgaaagacgaacaggccgcagaaagagcgaggctgtacggctggcacggcatcacaaaaaatgcctggaaccggtacggtgaaaaaggcagctggagatacgacgtgttactgccgggctttaaatataatatgacggatattcaggccgcgctcggtctggttcaattgaagcgcgcaaacgaaattcaagaaaaacgggcacagatcgctcaattttatgtacgtgaactgtcgggccaatctgacaaagcagcgcttccgctttctgacattccgaacggcataacgcactcatggcatttatttattttgcggatccgagagaacggcggcatggacagagatctgtttattgagaaaatgaaagaaaaacagatcgggctgagcgtgcactttattcccgtgcatatgcatccttactatcaaaaacattttccggccgagctgccggttactgaacgtgttttccgggagatcgtgtcactgcctctttacagccagttatcagatgaggattgcagctatattgtcaagtctataaaagaagttttgactatcagccaggaggtaggatcatgaaacatattgcgattatcggaggagccggttttatcggaagcgaattggcggcattattacaggctaaaggttatcacaccattattgcagaccaaaaggagccggcttttgacactgaataccgccaaacggatatccttgatcggacgtccctccgcgaatcactgcggggagcggatgcggttgtccatttggcggcaatggtcggtgtagacagctgccgaagcaatgaagaagacgtcatacgggttaattttgaaggaacgaaaaatgtcaccgaggtatgcggtgaattgggaatcagaacacttcttttctcatcgagctcagaagtattcggagattcacctgattttccttataccgagacaagcagaaagcttccgaaatcggcttacggaaaagccaaactgcaatcagaggaatatttgagagaacaggcttccgacaagcttcatattcgggtcgtccggtactttaatgtatacgggccgaaacagcgcgaggattttgtcatcaacaagtttttcagcctggccgagaatggctctgagctgcctctttacggggacggcggacaaatacgctgcttcagctacatcagtgatatcgtcaccggaacttatctcgcgctcattcatgaaggagccgtctttgaagactttaatatcgggaacgaccagccgatcacgataaaagaactggctgaaaaagtcaatgtgctctctggcagagagaaggataactatctgtttaaaaagctgggcgaagacggcgtgaggggaaaagacatcgagatttttaaacgggcgccgtcaatcgagaaggcgaaacgtttactcggttacgatccaaaagtaagtctgaatgaaggcctggagatcataaaagatgaaagacaaaagcacaaactttcactttcctgaaaacccggaagtagtcaaatatcccgtttatcccggacagctttccgtcagggaccgtctgcgcgcggtgaagcacttgcttactggcggacaaagcggactgactgaaaaactggaaaaacggtacggaaaaggggttgtgctgacctccagcggcagtgcggcactggtgctcgccttaacttattcgggagccgggccggggaaagaagtgattttctcatccttcagctgcccgaatgtcattgatgccgtattgcaatccggtgcaacgcctgtttttgcgcagctggatgagcatctttctttatcgtttgaggatgtcaaaaaaagagcgacgcggcagacgtgtgcggttatcctcacgcacgtatacggccggagagaaaataccgccatcattgactgggcgaaggaacacggtatttttgtcattgatgatgccgctcaagccatgtttacaaaacaagcggatacatatgccggcggtctgggcgatttcggtgttttaagcttcggcccgtcaaaaccgcttgcgagtatcggaggcggcgcgttaatcgcgccgaaagaatggcttcggcaaaaagcaaatttcccgatggaacagcgcagccaagtggcagctgactatcgaatttatatcagaaatcaaagaatacaggctgttatgaaacggaaacggcatcatcccgtttcatatatttataggaaagcgggcatcatgccttccatgaaagccactaagctcgaagctctgccggataaaccggctgttgtaccggtgcttcgcatgcatccggcaagggaagccattattgaagatcagctttcacttatggatcagcttgtaacagcttcgctccgaaacttacaagcggcgggagaaatctttataaaggcggaagagacgtacggcataaagatgatccagccccaagaaggagaacatctgaattatttaacgattgtattcccccgggatgaagagcggtacgggtgttccgtttatttagctgaaagaggcatccaaacatgctggaactatcttcccctcggacgtattccgatttatgaaacatatgcggcggaagaaggggaagatccgctttggaaaagagttctttctctgccgtttaaacctcctcttcaaaaggagcaagtcagatatatagccgaatccgttttatcatattgtgagcaaaagaataagactgaatagtggtgataacaatgcaaaaaacagcagtatgcacgagccgccaggcatgggatcgggccgctgacatgtatcaggcggggttgtttcaaagctatgattggggaattctcatggaagagcttcccggcacgtcatttcaccctgtcagactgacaacggacggaggacaggtcatctatcttccgctttttgaacagaagggcgtattatccggcaatatgatcggatacggcggcgttatttcagatcgccccatctcatttgaatggcttcaaagtgaaatcgaggccatattcggccggaacatatcccggatgctgctgccgtacggtcagacttcttttacagaagaaatcggggaagggtggacggaaaaggcgacacggattcttacgcttccggacacgtttgacgaactttggacgggcatttccggaaaagcccggacggcagtcagatacgctgaaaaagagaatattgtcaccaggctgatcgggcgacaagaacttgaatcattttacgacctctacaaggagcatacggcggcaatcggcgctgcttatgtgctgagccaaggatttttccaaaaactgcttgacacgtttggggaccggatgttttgggtcggagcatatcaggatgagacgctgatcagcagcagtatttttctctatgaccgctctcatttctattattggcagaatgtaaacagcctggcgggaaaaaaagcgcaggcctcttacttgttgatgcgtgacgctttgcaattcgccatttgccgcaagcttcaatgggctgattttggctattcacacagtaaagaaatcgcaagaccgaaacgatattggggagctgaagaaaaacaatgccgactttttacgaaaccggaatgaaaacaataagcggccatcaatccagttatctgccgtggtacggtttttttgaaaaaatgtataagtcggatctgtttgccattcatgacacggctcaatttgagaaaaaagggtttctgaaccgcaacagaatcaaaacgccgcagggccccagatggctgacggtgcctttgcagatgaaacaatataaagacatagagcttcggcatatgaaaatcgaccagacacaggattggcggaaaaaacattggatggcgattaagatgaactatgcgaaagctccctattttgagcggtaccagcatttttttcaagatgtctatcagagggagtgggaatatctccatgatttgaatatgcacatcattgaatttttccgaaaagagctccgaatcgaaacgccgctctgttatgtctctgagcttgaatgccggaaggagaaaaaaagcgattttgttttagcgctttgtcaggagctgggggcggatcgttattattcaggcagtcagggttccgactatttaatagaaagcgattttgaaagaaacggaattgtcattgagtatcagcagatccggcattttgactatcctcaattattcggggagcatatccctcacctctccatgcttgatatgctgatgaactgcggagcggatacagctgaaatgttagttaaaggagggcaatatgatgaaagtaatggtatttgcagcgcatcccgacgatgaaattatcggcgtcggcggcacgctcgccaaacatgtccgccaaggtgacagcgtgtcggcagtcattatggcggaaggcaagtcatcaagaaaaacggattatgagaagcctgaagagtctgttatgcagcattctgctcaagaaacggaacaagcgctcagcactttgggcatccatgattttgtcaggctgaaccttcctgataacagaatggattcaatggatttgctggatgtcgtgaaggaagcggagaaacaaatcaatcgttttcagcctgacattgtgtatacccagtacggcggtgacattaatattgaccactccgtcgtattcagagcggtcatgaccgcaacccgtccgcttcccggccatacggtaaaacgggtttttgcctatgaaacattgtcttcgacggaatggaattactgtcagaaggatcagtttcatgccaatttcttcgttaatattgaagacgagcttgaaacaaaattgaaatcgatggcgtgttacggctccgagctcagagacttccctcatccccgctctttgcaggcaatcgaacataatgcccgtgtatggggagcaaaatcgggtttttccgctgcggaagcgtttatgcttgtgagaggaacatggtgactgtcctatgattgctcaaattccgtttttcggacttgatccgaagcaaatcgatgagaaatgggtggaagcgggatacggtctggaagcgaatatttttgacggccgctcctttagtgaagcggattatctcaaaacattcaatcagacgctggaatatgcaaaacagcttgatccttcattattgacgctgcatttcccgacagatcatgccgattatgtgcatgaagatcacatcaaaaaacagctttatcactttgcggagctcgctgtgaaatacggcgccaaaggcataaccgttcatgcgaatcaatttatgacggttgaggaatttcaagtgtatgacctggaaggaaaccgtaaaaaaatcattgagtttttcgcagagtttgatgagcagctgaaagggacggacatttggatcggtgtggaaaaccttccgatcatcgggaatctgggagaggattttgatccgattttcatttatcctgaggattttacagagctggttcagctggatctgaagcatgtcggtattacgtgggatctgtgccattgggcgattacctatcagactcacttgtcttccgcgcttatgttcagaaatgaccagctgagatacccggatttctttcagtttctctcgataaaagagagcattaaacattatcacttcagctcatttcgccagcttgcgttcccgcatggcggcgtccgctgttttgagggccgccatccgagtgaagggacgatcgctgaggagctgctgagacgggctgccgatactttgcaggagctttatcggaatcaagataccggcattgtatttgaggtgatggaagaggattatacggaaagacgggaatcatggagaacgctggaatggttcggcggtgtttctgatgccgaggatcaaaaaagggcctgatatgacatatcgaacaccgaactatgcaaagctttggtgtgcgcaggtgttttcttcagcggcggacggtatctggcttattgcactgccgctgttagtgctggaattgaccggcagtaaaattcttgtcggcgttatttcttttatcgaactcgtgccgttgacatttggcgtgctggcgggaccgctgattgatttattccgaaaaaagtcgatcttgtatttgtgcaatacgggccgggccgtcatcatgatcctcttggcggtgctcagcgcgaacgatttattaaccgtgtggatagcaggggtgtgcgccttttgtctatctctgcaatcgatgctgtttgcgccggcgaaagtcgcgatcattccgctgctcgtccgcaaacagcatcttgatcaggcgacatctctgatcaatacgagtgacttgatcggactcatcgtcggaaaactgatcagcggaatcatgattgcggctattccgttcgggctgctgtttgccataaacggaactgctttttttatctccgcggcatttatcgcgttcattcgtatttcagaacagcccaatgaaaaaagcaacggggctgaagatgtaaaagccggctacagaatgctgaaaggaaatgcggcatggctgacatcggtcggatactttttcgtcgtaaatctcgtcattgccggtcttatttcagtaatggggccgattcttgctgtggaacgttttcagcagaactattctgtatggtttgccgtcatgtattcaatgtttcaggcggggatgcttttgggcaatctggccgtatttttcaaatggaatacaaaacgcttgaaccggctgtatccgcggacgttaacggcagcgggactgctcattttggtgctgttttttccgcttcacgggtttgagtgcatcattttcctggtgcttggcatcatcatctcgtatattgatgtgcaaacggtgctgtatttccaaaagacggttccggccgcatatttcggaagggtttttgcactgattttttccattgtcaaaatgggtgaaccgctgtctgccgctgtctacacagggcttctgctgttgatgaatgcggattatatttttgcggcggtcggactgacccttacgatcgtttttgctgttttttcagtcagacaagggagtcaaagaaattcagagaaacaagcggatcaatccgtctgaatggtaaacgaaggtgcgccggtatcagccggcgccctttttatcataaatccaaataaagccgtatcatatccaggcattgaatgccgttttcaaaaatgtcttcatcataatgtctgataaaaaaatcatggtcgacagcctgaatgcggaatccgcatttttgatagagtgacagctgatgaatactggaatttccggtgccgatttcaatcgtgtcagctcccgattgtctcgctttttcaatggcatcttgcaccagctgttttccgaatcccctgttctgcagcgattcttttaccgcgatgtttacgatttctatcgttttaggccttgtttgcaataaaacgtaaacccctgcaagctcgtctgacgtccaagccgtatagcattctcctcttacaagataatcatcgacaatctctttcgacggatcggccagcagcaatagttcatacagcgcttcatccggatccgcggcttttcggatgctcagtttttgcatgtccgtttctcctcctccgttatgatcgacagctatttttcaaaataactccaaaatcattctactttattataaaatatgaaacataggaaaagttatacaagttttgtagattgaataggaggaaagtcatgtttttttgtaagtattgcggccgacagaacaacgaagaggcgcatttctgtaaagaatgcggaaaaccgatcgggaaaggaagccggcttgaacggcaggcggctgtaagagcggctgaacctgcttcacaaatgagaaagccgatccctaaaaaaacgctcttcatatggggcggcatagccgcagcgctgatcttattgattgccgcatataaaaccggagcctggctgacatctgaaaaaaggctcacggatcaattcgaacaggcggttcatgacggggacacgaaaaagctcgcagccctgctcactccttcagacaaaaaactgaagctgaatgagaccaatgtcaaaccgctccttgcatacgcaaagaaacacgatgaactgctggaaacgcttcgcggcaattcatcagaaaaagatgcggtatacgtcaaaaaagagggtaaaacccttcttttgtttgaccattacgaactgaaagtcgatccggtttatttccgcgtcaccagcaattataaaggcgccgatctttatatcaacagcgagaaaacagggacggtcaaaaaagccgatgaaacccaaatcttcggcccgtatgcacccggtgtctacacggcggaagccaagcttaaaaatgacacggttgacgttgtcaaaaagcaagaggcagaggcggccggcagccggaatgttgattttgatctgccgttagacgccgaggatgtgacgttcactccggcagacagcttcaaaagcgcgaaaggcgatctgctgataaacggcaagtccgtccataaagatccgtttacatccgttacatacggtccgctcttaactgacggttccatgacagccgccgtggaggctgattttccttggggaaaaatgaaaactgccgatgttccgatcaacggtactgatatggaattaacgcttatcccggatcaagatacacaacaaacaatcatggacacgattgtcaaaacaacgaagcagtatacaaaagcgatggcagacggaaataccgatcagatgaccgaggctggttccgcctggaaagagcagacgaaagaagtggtatccggcatgaagagttccggcacctttttgaaagatcagtataaagagacaagctttgatctggattcatttgcgatttctcaagagaacggccgctggcaagtaactgttacgggtaaagagcttcatgagtctgcttatttcgacgggaatacgaagcctgatatggaagaggctgagccgagctttcattatgtactctcatatgatacaaaacataaaaaatgggtttttgaaaaagctgatccagcctcagattcttctgggacaaatgtaaaaaaaataaaaaacgaccagccgaaaacctatacatccgcatgggcatcttccaaaggaaatacagcttcaggcagcgtgacaaacgagcaagtcacatcgtttatgactgattacctgacaaatcaatcaagcgccgtcagccttaacaattttgccatcatggcgggcaatttagaagagggaagccctttgtatgctgatcagcagaaactggtcaaaaaactgtacagcgaggggacgactgaagtatttaataaagtgaatgtcaaaagcttttcacagaaaggctctcatctgacgattcatacgtacgaggagttttatattacgaaagccggcggcagtccgaagctcagaacatacaattggacgtatggcggcgttgtcaaagacggaagaatttatttaacatccattcaataaaaaaacccccgcgccaatcaggcggcgggggtttccgtttttaaaagaagaaataattcatgagttctttcatataatgcttgatcgtgaattgaaacgttacgcaaatgatcaaatagatgacgataacagaataaatgatatccgccttagcagtgagctgatgctgatagctcgccagcatgagcggaggcacggcaaacgccgctcctaaaagaccgacagccagaatggtaaagcaaacggttgtatgaagcagcataaaaatgagggcaagaagcaaaatagctgtaaacggaatcaaaaatgctccgaatctggacagcgaatctttaaatgacacctgcgcgccgccggccttcaaagcgataaaaatcaagagatacaggcagaaaacgcataatgcaaaggtaagcgccggtttgatcacaaccgcggtaaaactgacgtcacgaaagccgtctgataagagaatataaaacataatcggcgtcaccaggcagaaaagcaccatgttgatgatgctgctgacaagctgttcgccgcctgtcgttttacatgtttgatacggtctctttaacacatcaagcacgaataaggcaaattgctttgaagcctgcttagccgcggcgccggcctgagcggcctgaccctgtgtttggcctgcgcctccctgcccgggctggggcgcaccgcatttttcacaaaattttccgccatcagtatgatggccgcattgagaacaatacattctaaaactccttttacaagtaatatagggattttgttcaatatttacattataaaagaaaataggacggatgtaacggagttttctaaagatatataaatcaccttctctatgaattgataatagagaaaaagtacccattatggtagaattttattggagctgatagatatcatgtctctcggcgcattgattcagagtgaaaaaggaaattaacgcatgctaaaaaaattgaaaatgctttatcggctgttgaaattcggaaaaggcttatggagatagcaaacagaaaaaaaccgtccttacaaggacggtttttttctgttttccggatcgtccggctgaggttataaaaagcagaccccggggtaaaaatcatgcataagaaacagcggagaacaaaacataactcaataacggcaagtcataaggaggtacgcatgttttcattcatcattcatgtcttcatttcactgtttgcagtctccaatcccatcggaaacgtgccgatttttctttcactgacggaaggatacccggagaaagaacggacagcgatcgcacgcaaggcttccgtgctgtcgtttatcatcttggctgcttttttaattttcggccatctgatctttaaactgttcgacattaacattcatgccttgcgtatcgcgggcggcatttttattttcggcatcgcttataatcttctgaacgcgaagaaatctcatgtacagtctctccatcatgaagagaaaggggagagcaaggagaaagccgatatatccgtgacgcctttgtcgattccgattatcgccggacccggtacgatcgcgacggtgatgagtctgtcggccggccatggcggcatcatccattacatcagcgtgcttatcggcattgcggccgtcatcgcgatgacgttcatcttctttcactattcttctttcatcagcaataagctcgggaaaaccgaaatgaacgtcattacccgactgatggggctgattttggcggtggtggcgatcggcatgatcggcgccggtctgaaaggcatgttcccgatattggtttcctgacttaaaaaagcagcgcccggttatcttcgggggctgcttttttctattttcggcacatgctgaaacacttcttcactctcaaaaaattctatcaaacggctcagccagtcataataatggagccaatccgtcagttcatccaaaagctgacgggctttttcttcaatatcgggactgagattttccgattccagaagctcagtcagctcgcggttcagctttttatagagcattttgtttttgctgaccgcctttgtccaatttgccgtaaacagggagataaacgtctggtaataatcacgctccacgtcgtaaaggtctttgcgaacgcctttttcaaacactttttccgccagattggcatcagtcatttcacggaccacctggctcatcctcgttttgctcatcccggttgcctctgacagctcatttaacgtcatcggcttgcggttcatataaataataccgagcacacgaccaagtgtggccggcattccgaatgtatgcatattctcggcgattctctcaatgagatgctcttcagcatgcccgatgatatcaagagcgtttttttccacggctgatcatcccttcactggcttttcatgctgacaatatatcatattttttacagttgatgaaaaagatgatgcggcaggatatgcgagctatcgggagcgattgtaagaacatccgcattgtcagcgggataacatgaaaaaatacgtatattgtatataatttcaacacattgtaaactttttattttacaaatttcatcttataataaagattatacttttcagaaaaataacggaacccttcggaggtgcacggattgctgagattagaaaatgtatcgaaagtctataaaggcggaaaaaaagctgtcaacagcattgatttaaatatcgaaaaaggcgagtttatttgttttatcgggccgagcggctgcggaaaaacgacgacgatgaaaatgattaacagactgattgagccgtcatccggaaagatttttatcgatggcgaaaacattatggagcaggacccggtggagctgagacggaaaatcggctacgtcattcagcagatcggacttttccctcatatgaccattcagcagaacatttctctcgtgccgaaactgctgaaatggccggaacaaaagcggaaggaacgggcgcgggagcttttgaagctcgtcgatatgggcccggaatatttagaccgctatcctcacgagctgagcgggggacagcagcagagaatcggcgtgctgcgcgcccttgcggcggaaccgcctcttattcttatggatgaaccgttcggagcgcttgacccgattacacgggattcccttcaggaagaattcaaaaaactgcaaagaacattgaataaaacgattgtgtttgtaacccacgatatggatgaagcgattaagctggctgaccggatcgtcattttaaaagcgggagagatcgttcaggccggcactcctgatgacattctccggaatccggctaatgagtttgtcgaagaatttatcggcaaagaacggttattgcaatcaagaccggacattgagcgcgtcgagcagatgatgaacaaaaagcctgtcaccgttacggcggacaaaacactttcgcaggcgatccaagtgatgcgggagcaccgtgtcgattccctgcttgtcgttgatgacctgaatgtgctgcaagggtatgtcgatgtcgagatcattgatcagaaccggaaaaaagcgagcctcgtcggcgacgtgctccgctctgatctgtatacggtcgagcagggtacactgctgcgtgataccgtacgcaaaattttaaagcgcggaatgaaatatgtacccgtcgttgatgaacaaaggcatttagtcggaattgtcacgcgggcgagccttgtcgacatcgtttacgattcaatctggggcgaggaagaccagctggtgacaggctgacaaggggaggaacgcttacaatgaatgaaatgatcaagtttttgcagacgaacggcggagaactgttatataaaacgtgggagcatttatacatttcgatcatcgccgtcatattaggcattgtcgtcgccgttccgctcggagtggcgctgacgagaatgaaaaagggcgcaggcgccgtcatcggcgccgtcaacattgtgcagaccttgccgagtctcgcgatactggcgttttttatcccgctgttaggcgtgggaaaggtgcccgcgatcgtcgcgctgtttttctattcggtgctgccgattctccgaaacacgtataccggcattcaaggcgtaaacaaaaatctgctggaatcgggaaaaggcatcgggatgacggtctgggagcagatcaggcttgtggaactgccgcttgcggttccggtgattatggcgggcatccgcacatccaccatttatctgatcggctgggcgacgcttgcttcctttatcgggggcggcgggctcggagactatatttttatcggcctgaatctctatcagcctgaatatattatcggcggcgccgtgcccgtcaccattttagccattatcattgattatctgctggcggcgacggaacggaaggtgacgccgaaagggctgaaaggactgaaggaagtatcataaggagttggctgttttgaaaagaaaccaaaagagatggatgtgcgcactggcgctgtcagctgctctgcttctgggcggctgttcccttcccggcctgagcggggcttccgatgatacgattaaaatcggggcgcaaagcatgacggaatcagaaattatcgccaatatgctcgcacagatgattgagcacaatacagacttgaatacggcattaattaaaaacctcggatcgaactatgtccagcagcaggcgatgctcggcggtgaaatcgatatcgccgcgacgcgctactcgggaacggatttaacgagcaccctcggcatggaagcggaaaaagacccgaaaaaagcattatctatcgtccagaaggaatttgagaaacgcttccattacaaatggtttgattcttacggatttgagaacacatacgcttttaccgtcacgaaagagcttgcggaaaaagatcatttagacaaagtatccgatattaagaagcatgcggatcaatttaagctcggtgtagacaatgcgtggctgaaaagaaaaggcgacggctataagggcttcaccgacacgtacggttttgaattcggcacaacctatccgatgcagatcggacttgtatacgatgccgtgaaaaacgggaaaatggacgccgtcctcgcttattcaacggacggacggattaaagcgtacgatctgaaaattttaaaagacgacaagcagtttttcccgccgtatgactgttcgccggtcattcccgacagcgtgctgaagcagcatcctgaactgaagggcattgtgaataaactgatcggcaaaatcgatacggaaacgatgcaggaattgaattacgaggtggacggcaagctgaaagaaccgtccgtcgtcgctaaagaatttttggagaaacatcattattttgaataagaaatgaggtggggcaaatggaagtgctgcagcagctcggcacttattattctcaaaacggggcctatgtgcttcaggagttttaccgccattttctcatgtcggtatacggcgttttatttgcggcgatcgtaggtgtcccgctcggcatcttcattgccaggtacagaacattaagcggctgggtattcgcggtgacaaacgtgattcagaccgtgccggcgcttgcgatgcttgcggtgctgatgctcgtcatggggctcggcgccaatacggtgattttgtcgctgtttttatattcgcttcttccgatcatccggaatacgtacacaggaatcgccagcattgaacacgcttatcttgaatcgggaaaagcgatgggcatgaccaaatttcaggtgctccgcatggtggaactgccgcttgcgctttccgtcatcatggcggggctgcggacggcccttgtcatcgcgatcggcattacggcaatcggaacgtttgtcggcgcgggcggactcggtgacatcattgtcaggggctcaaacgccacgaacggaacagcgattattttagccggcgccattccgacagcgctgatggccgttatcgcagatcttgtgatggcatggctggagcgggcgctgagtccggtgagaaagaaaaaacgaaccaaagcgccgaatgcggcatgaaaaaaacgccttgcgggtcagggcgttttttttcttatggcttcggaacatgcttgaatatttcttcgctttcaaaaaactcgatcagacggctgatccagttgtagtaatcaagccaatcctttaattctttcagcagttcgttgattttttcctcagcttcttccggcacgccgttttcaaggacggccgtcagttcgcggttcagttttttatgcatcattttatttttgctgacgaccttgctccatgtggccgtaaacagcgtaataaaggtttggtagtaatcctgctcgacgtcgtataaatctttgcggacgcctttttcaaacactttttccgccagattgacgtcaagcatttcacggaccgcctggctcattctcgttttgctcatgccggtcgcttctgataattcagttaaggtcatcggcttgcggttcatataaataatgcctaaaatgcgccccaccgtcgcgggcattccgaatgtatgcatattttcagcgattcgttctatcaaatgatcttcagcttgttcgattacgtgtaacggatctttctccaacagtttcaatcctttcagtcagcaattccgatgtcaatataccacatttttaaaccggcggaaatgctcttccgagagaatttggcagtaattcggagcaataagaagaactttgccggtcaatacgggtaaatcagtgcttacacaacctttatatataatatggacaaattgtaaactttttaatttacaaagtttaatttataatgggaaacgttcaattgtctgaaaagttaaatttgaatttaacgatttgaacaaatttaatatcggaggtgtgagtgtttgctgacattagaaaatgtctcgaaaacgtataaaggcgggaaaaaagccgtcaacagcatcaacctgaatatcgacaaaggcgaatttatttgttttatcggaccgagcggctgcggcaaaacgacgacgatgaaaatgatcaaccgcttaattgaaccgacagaaggcagaatcctgatagagggccgaaacattatggaacaagacccggtggaactcagaagaagcatcggctatgtcatccagcagatcgggctgtttccgcatatgaccattcagcagaacattacgctcgttccgaagcttttaaagcattctgccgaaaaacggaaggaacgggcgcgggagcttttaaagctcgttgatatggggcctgaatatttagaccgttaccctcatgaactgagcggaggacagcagcagcgaataggtgtattacgggcacttgccgcagagccgccgcttatcttaatggatgaaccgttcggggcgcttgacccgattacgagagattcccttcaggaagaatttaaaaaactgcaaaaaaccttacataaaaccatcgtatttgttacccatgatatggacgaagccatcaagcttgcagacagaatcgtcattctgaaagcgggagaaatcgtccaggccggaacgcctgatgagattctcagatttccggcgaatgaatttgttgaggagtttatcggcaaggaacggctgattcaatcatccagccctgatattgaacgggtggagcagatcatgaatcccgatcccgtgacggtaacacctgagaaaacactgtcagccgccattcagctgatgcgtgccgagcgggtggattcgctgctcgtcattgatgaaaagaacgttctccaaggttatgtcgatgtggagatgattgaccgcaaacgaagacaagcggtaaccgtcgcggaagtgcttgaacgggatctgtacacggtcagaagcggcactctgcttcgcgacgccgtccataaaattttaaaaagaggcgtgaaatttgtgccggtccttgatgaggacggccggctaacgggaatcgtgacaagggcaagcctcgttgacatcgtctatgactccatctggggagaagagaatcagctcgcggtgatgtcatgaggaggcttcaattgatatgaatcagaccgtacaatttttacaggcaaatggaggagagatgctttataaaacatgggagcatctgtacatctcattaatcgccgtcatggcgggcattctcgccgccgttccgctcggcgtcctgctgacgaggatgaaaagaggagccggcgccgtcatcggcatcgtcaacatcattcaaaccttgccgagccttgccattcttgcgttttttattccgcttttaggcgtaggaaaggtcccggccgttgcggcgctgtttttctattccatgctgccgattctcagaaacacgtatacggggattctcggcgtcaatcggcaccttctggaatcgggaaaaggaatcggcatgacggcatgggagcagatcaggcttgtagagctcccgcttgccgccccggtcatcatggcgggcatcaggacgtcttcgatttatttaatcggctgggcgacgctcgcctcctttatcggcggaggcgggctgggagattacatttttatcggcttgaacctttatcagccggagtatattatcgcaggcgccgttccggtcacgatgctggcggccgccgtcgattacatgctgggggtgacagaacggaaagtcacgcctgacgggctgaaaagcataaaggacgctttataaggaggaggtctcacatggggaatagatgcaaaaaacggctgctcgcaatcgcctgtctcggcatgctgctccttggcggatgctcgctcccgggattgagcgccgcatcggaggacaccattaaaatcggcgcgcaaagcatgaccgaatcggaaatcatcgcaagcatgctcggacagatgatcgaacatcacagcgggttgaaaacatccgttattaaaaatctcggctccaacgccgtacagcagcaatccttgatcaacggtgatattgatatcgccgcgacgcgctatacaggagacgcgctgaccgggacgcttcgcatggagccggaaaaagacccggacaaagcgctgcggctcgttcagcgtgaatttcaaaacagatatgacatgaaatggtttgattcttacggctttgataatacatacgtctttaccgtttccggacagcttgccagcaagtaccatttagaaacggtatccgatgtcaaaaaagaagcatcccatctgaaattcggcgtagataactattggatgaagctgagaggcaacggatatcaggattttatgaaaacatacggaatgtcatttgaaggcacgtatccaatgcagatcggcctcgtatacgacgcgctgaaaagcagaaagatggatatcgcgctcgcttattccaccgacggaagaatcatcgcttacggactgaaaacgctgaaggatgataagcggttctttcctccgtatgactgttcacccgtcgttccggatcatgtattaaaagagcatcccgaactggagggcgtgatcaataaaatgatcggcgcgattgatacaaagatgatgcagaaaatgaattacgaagttgacggccgattaaaagagccgtccgtcgtggccaaggaatatttagaaaaacatcattactttgaataacggaaaggagatgtgcggatggacacgatgaaagagttgtttacgtattacgctcaaaacggcagctatgttctgtatgagtgctggcggcactttctcatgtcggcgtacggcgtcgttttcgccgccgttttcgccattccggccggaattgtgacagccaggcacgggcgtctcgccggctgggtgtttgctgtggcgaacgtgattcaaaccgttccggcgcttgcgatgctcgccgtcctgatgcttgtcatggggctcggcgccaatacggtcatcacggctttgtttttgtattcactgctgccgattctcagaaatacgcacacgggcattatcaatatcgagcacgcttatctcgagtcgggaaaagcgatgggcatgacgaaataccaaatccttcgtatggtggagctgccgcttgcgctttccgtcattatggcgggtctccgaacggcgctcgtcattgccatcggcatcacagcgatcggcactttcgtcggcgcaggcggtctcggggatatgatcgtcagaggctcgaacgcgacaaacggaaccgccattattctggcgggcgccattccgaccgcgctgatggcggtggccgcagacctgctgatggcgtggctggaacgagccctcagccctgtgaaaaaacaaaaaagaaagctgatcgtacgctcagcctcatgaaaaaaagcattcttccgcgtgaaggatgctttttttgatttcttgattaaattttgataactgcgctgtaaagtcttacatatcaaataacaaagcagaggggtaatcatatgagcaacatcatagaaacgagacagctgcaaaaatcattcggcagacaacaggcagtggctgatgtgtctctatcggttaagcgcaacagtatatacggcctgctcggtccgaacggcgcgggaaaatcgacgactctcaaaatattgaccggcatgctgcagcaaacatccggcgaggttctgttcgagggacatacatggaagcgcgaagatttgaaaagcatcggttccctgattgaagcaccgccgctttacagcaacctgacagccgctgaaaatctgaaagtccgctgcgtgatgctcggactgcctgattcaagaattgcggaggtgctggaaattacgggattaacgggaaccggaaaaaagcgcgccggacaattttccatgggaatgaaacagcgtctcggcatcgcgttggcattattaaaccgtccgtcgctcttaattcttgacgagccgacaaacggattggacccgatggggattcaggatttgcgggaatttatccgctccctgcccggacagggaatgacggtgattttatcaagccacctgttatcagaagtggagcagatcgcagaccatatcggaatcatcagtgacggcgttttaggatatcagggagaaatcagccgggaagacgatctggagcggctgtttctggaggttgtcaaatcaacacgggagaaagcggggacaggaaaatgattcagtacatgcaggcggaacaccttacatctaaaagaacatttatcagaaagctgatcattctgattccgcttctgaacgcggctttttcttttctgctgaatgcggcctattttatgacgggcacgttcaattggtgggcggttattttcatgccgctcatgattgctctaatgtgcggtttatctgttaaaaaagagaaaaaatcagcgaatgaccgcgcggtgtactcattgccggcagatttaaaaagcatatggttctcaaaaataagtttgatcgcgctgtattcactcctgtcgcaaatcgtctttttagtcatcgtgtttttgcttggccttgtgtttccggcaattgctgcgctgcagctgaaaggcgttgaagcaagctcccttttgtggctgacgacgctttgggaaatcccattgtgcttatggattgccagacagttcggatttacggcagtcattctcatcaatatgatcgccgcctttgttttaggcattgtgccggcgtccggttcattgtggtggctgagtccgtggagctggtcagtccggctgatgtcaccgattctcggaatccacccgaacggaattccgcttcccgcaaacagcggcttattaaacggaaacgtgatcattccggctattattctttctattctttcttttatcgcaataagttttgtttccgcagtgtcattttcaaaaggaggaaaccggtcatgaccgtgcttttacgatatatgtgggccgatgtattaaaaatgaagcgcacgccgctcatatggatgcatgctgcggcgccggttttatgcgcgggatttttcctgttatatatgtatggaagggttcaggagtcttatatgctgtacagcgtctttttcagcgcgattgccgttttataccctctgatcatcagtattgtctgcggcatgtctgcctctgtcgaggaacaggcgggccattttcagatgatgctggcggttccgtattctaaaatcgtcagttttgcgggcaagctgcttctgctgctcctattgaatgtgttatcggttggtctcgccatctgtctttatttggcggggttgaaatttgttcttcacatcaatgatctcccgtatcttctctttttaaaaggaggggcgtggctgattgccggcagtattccgctttatatgatgtctttttttgtcggcataaagtacggcatgggaccgtccgggcttttagggggtgcgggattattaatggcggcgctcatgaatacgggacttggcgatatcatctggcgtttttttccgtgggcatggagcgtgaggctttcaggccttgcaggactgctgcattttgacaaagtcaaaaaagagttcctcccttatgtaagatacgatatgagattcggagaaataatgttatatttttctatagtgatattatgtctggccggcctctattggtgcagaagatgggaagggcggcgttcatatgaataaaggcaaggagcgattcggccggtggcaaacattttagcaattgatgatgaaaaagatattctcgttctgatcagaaacattttacagcgtgatcagcatacagtaacgattctggaaaaagcggaagatcagtcattggatttttttcaaggctatgatttgattcttcttgatgtcatgatgcccggaacggacgggattgaactctgccggcggattcggccgctggtggacagcccgatcctgtttttaacggcaaagtctgacgaagaatccattgtgaaaggcctcatgacaggcgctgatgattacatcacaaagccgttcggcgtacaggaattgatggcaagggtaaacgcgcatgtcagaagggaacggcgggaaaagcatcagacgaaacggctgatatcaggcttcatgtttgattttgacaataaagaagtatggatggatgaccggaaactgcctcttacgaaaaacgaatataaaatcgttgaatttctggcacagcataaaaacagaacattctcacgggagcagatttacgaggaagtgtacggcttggacggcgatgcgctctattcaaccattacggagtttatcagaaccatccggaaaaaatgtaaagaacacggggctgatccgatcaaaacggtgtggggtgtcggatacaaatgggaatagcaaaaggaaaatccagcatccgcaaagagcttgtcaaatttaccatcactttgtgtctgagcacgatgggggtggcggcattatgcgtcgccttaaatgccattgccatgaatgccggagcgatcctgcccgcaaactacagcgagcatgaggcggaacagatcaaaccccgcctgaaatcagcggaaaagataacagaagacatgatccccgcaggtatgacatacgccgtttttgataaaaaaacaaagcggatgacaaaaggaacgatgacggaacaagatgcggccaacgccagaaaaaagattcagcatacgccgtattttaattatgctcaaaaaggattcatggtgataaatcggaaagatgaatacggcgttctccaatattcactcaggtcggaatttcagtcgccgctgttaaggcgctatctgccgaattatgaatggacgggtcttacgattctgatcactttgcttcttttgactgtttttatcgtgacgacgcgtttcgccaatcagctgagacggcatttcagcacactcagctccattacggcaagcattcaaaaacagaatttaaatatcaatccaaaaaggtcgcgtataaaagaatttgacgatgtcattgactctctgctgaaaatgaaagacgcgcttcaggcatctctggcggcgcagtgggaggcggagcggataaagaaagaacagatcggcgcgcttgcgcatgatattaaaattccggcaacgatcattaaaggaaatgccgagctgctccagttaacagaacctgatgaggagcaggcggaatatgcgcagtatatcctggatgccggaaacaaaatcgagcattatgtcggacagctgatccagctttccaaagcagaggaggcagttgccgttcatgtcgaatataccgacctcaaagagtggattcaaaacatatatcgtgacgcggcggcgcttgcggggccgaagcagatggatctcgtcctcagcgaacggggaattgaccgaatagaagcgccgatcgatcatgagctgctccacagggcggtcatgaatatcgcggcaaatgccgtcgactatacgccggaaggaggggaaatccgtgtggacgtcctgtgcaccgattccgccctccatcttgccgtatccgacagcggaagcgggttctcgccggaggcgctgaaaagagcgacacagcttttttacacggaggataaaagcagacattcggcggggcatcacggcatggggcttacattcgcccatcacgtcgtacatcttcatcacggcgaattaatacttgaaaatcaggagtctggaggagcccgggcggagattcgaattccgctggaaggcgtcagacaaaaacaagccctgcacgcctgagggcttgtttttctgtataagaaaagcaaaaataaaaacggctgtccgtttgagagatcagccgcttatgcggaaaagagtttatcaggaaggatcaatccatgttgaagaccacttggaaatttcctctaaaataggggctaatgcgcagcctttttccgttaaagaatactcaatgcggacaggcgtttcggggataacatcccgtttgatgacaccttctgtttcaagttctttcagacgttctgacaagactcttccgcttaaattcggaagcgccgcttcaatttcgctaaatcgctgctgtccgttcaataactgaaagacgattagagccacccagcgtttacttaggatgtcgaccgctttttcgaatctggggcacatttctgattggttcatgctttttcacctcgtcttctgctattataccgcaaaatcggagggaacgtacgtctggcgcttgttaagttgaggagaggatcaaaaagaggatgaggaatccggggagcgttttttcgcttcagccgcaataaaatcaaagtatttgctgacgctttcaatatcttcttttgtgaagtgctgccactttttgctgtcaaacagcggcagatgctccgcgcctctgtcaacggcggtctgatagatggcgcagatggattgatagctttcggaggtttcacggatttcctcctgaaatgccttgatgtgtccggcccgcgccattaactcctcgtacgggatttttaatgtgtccgccaattttctgatggtcgcgggtttaggaatgccgcggtgcccgttttcaattctggaaatggtcgccgagctgacgccggaatagacggcaagctgattgacggtaagcttccgggcgcggcgcagctctcttaattgctttccgaatgtgttcaataagatcgcctcacatgtgcaaagtcatgagtcttcatttgttctttttttggcttccgccgataagaacgcaaagtatttatcaagcagaaccaagtcttctttcgacaggtgccgccagttctcccgctccaaaagggataaatcatgcagctcatacgtttcggctttttccagcaaggtgcagcccgtgtcgtacggggctctcgtttcctggacggtctctatgtatcccgccgtctgcatcagttcctcatacgggatttttaacgcatctgcgagctttttaatggttgcaggtttcggcactccgcgtttgccgttttcaatccgcgagattcccgcggcgctgacgcctgaatacgttgccagctgattcactgtcagatgccttttttcccgtaatgtccgcaattgtttcccgaagctttccacagtctctccccctcccgcggtctatttatattctagtatgtttattgactaaagggaatagccaggctggaaaagtattgacaaaagttaacaaaagccgtatcttatgtataagaaagaaagtatttgacagaacggaaggtgaagaaagtggtcgaaaagatacagatcagaagagattatgtgctgcagtatatggtcaataatgactactcgttaaaccagctcgccctggagatcggaatatctcccgccacactgagccgtgtactgaatggagagcgaaggccgggccagctggtcatcggaaaaatgctctattactttgacatgaaatttgaagatcttttttactacgactttgttgacaaaagtcaatgaagatggaagattcaaacgcatttccgtttttctgacatgatgtacaccgatacggcgtgacatgcctttgtttttcatgtaaaatagaagcaatgtaggccagtcagtctggaggtgtatgggatgcacacattattgattaccttattggttatcgtcagtattgcacttattattgtcgtattgcttcaaaccagcaaaagcgccggtttatcgggtgcaatttcaggcggggcggagcagcttttcggaaaacagaaagcaaggggccttgatctgattcttcaccgcacaaccgttgtgctggcagtcttgtttttcgtgttgacgatttcgctagcgtatatcgtataaggcaatgtttgtataaggtctgatttaatatcaggcctttttcttgttgagagacggcgtttgtttctcgcaaaactgtggaaaactaaattgaatgtgcaaaaaaggggttatgagcatgaaaattgtgacaccaaaaccatttacatttaaaggcggagacaaagcggtgcttctgctgcacggatttacgggaaatacggcagacgtcagaatgctcggccgctacttgaatgagcgcggctacacttgtcacgcgcctcaatataaagggcacggcgttccgccggaagagctggtacatacgggacctgaagattggtggaaagacgtcatggacggttatgagtatttacggtctgaaggctatgaaaacattgcggcgtgcggactgtcgcttggcggggttttttcattgaaattgggttacactgtacccataaagggaattgttcctatgtgtgcgccgatgcacattaaaagtgaagaggttatgtacgaaggagttctctcctacgcgcgcaattataaaaaattcgaaggaaaacagccggagcagattgaaaaggaaatgaaggagtttgaaaaaacgccgatgaatacgctcaaatcgctccaggagctgattgccgatgtgcgcaaaaacgtcgacatgatctattccccgacatttgtggttcaggcacggcatgaccatatgattaatacagaaagtgcgaacatcattttcaacgaggtggaaacggacgacaaacagctgaaatggtatgaagaatcaggccatgtcattacactcgataaagaacgggacctcgttcatcaggatgtgtacgaatttttagagaaactcgattggtaacaaacaggaggtcgaataatggaaaaagaagcgtttatggaccgtcttctcgcgtttatgaaggaagaggcgtacaagccccttaccattcaggaactcgaggagatgctgaacatcacggaagccgatgaatttaaagagctggtaaaagcgctggtggcgctcgaggagacgggacagatcgtccgcaccagaagcaaccgctacgggcttccggaaaaaatgaatttagtaaaaggaaaaatttccgcgcatgcgaagggcttcgcgtttctgctgccggaggatacctctttaagcgacgtgtttattccgccgaacgagctgaatacggccatgaacggcgatattgtcatggtgcggctcaattcccagtcaagcggatcgagacaggaaggcacggtcatccgcatcctggaaagaagcatcgaccgcgtcgtgggcacatacacagaaacgaaaagcttcggctttgtcatcccggatgataagaaaatcacgagtgatatttttattccgaaacatgccaataacggcgctgcggaaggccataaagtcgtcgtcaaactgacaagctatcctgaaggcagaatgaacgccgaaggggaaatcgttgaaatactcggccataaaaatgatccgggcatcgatattttatccatcatccataagcacggcctgccgggagattttccggctgaagcgatggagcaggcaacaagcacgcccgataccatcgatgaaaaagacatcaaagaccgccgtgatctccgcgatcaggtcattgtcaccattgacggcgccgatgcgaaggatctggatgacgccgtcaccgtgacaaagcttgataacggcagctacaagctcggcgttcatattgccgacgtcagccattacgttacggagaattccccgattgacaaagaagcgctggaaagagggacaagcgtgtacttggttgaccgggtcattccgatgatcccgcacagactgtctaacggaatctgttctttaaatccgaaggtcgaccggctgacgctttcctgcgaaatgacaatcaaccagcagggacaggtgacggagcacgagatcttccaaagcgtcatcaaaacgacggaaagaatgacctattcagatgtcaaccggatccttacagaagacgacgccgagctgaaagaaagatatgagccgctcgtcccgatgtttaaagacatggaacgtctggcggaaattctccgggcgaaacggatggaccgcggcgccgtggattttgatttcaaagaggcgaaggtgctcgtcgatgaggaaggcgccgtaaaagacgtcgtcatcagagagcgctcagtagcggaaaagctgatcgaagaattcatgcttgtcgcaaacgaaacggtggccgagcacttccattggatgaacgtgccgtttatttaccggattcacgaagagccgaacgccgaaaaactgcaaaagttcttggagttcgtcacgacattcggttatatcgtcaaggggaaagccggagacattcatccgcgcgcgctgcaaagcattcttgatgaagtgcgggaccgtccggaagaaacggtgatttcaacggtcatgctccgttccatgaagcaggcgaaatacgacccgcaaagcctgggccatttcgggctggcgactgaattttatacgcacttcacatcgccgatccgccgatatcctgacttaatcgttcacaggctgatcagaacgtatttgatcaacggacaatcggacgaagcaactcaggaaaagtgggccgaacgccttccggaaatcgctgaccatacgtcaacgatggaacggcgcgccgttgatgccgagcgggaaacggacgatctgaaaaaagcggaatatatgcttgataaaatcggcgaggaatttgacggcatgatcagttccgtcacgaatttcggaatgttcgtcgagctgccgaatacgattgaagggcttgtgcacgtcagctttatgacggatgattattaccgttttgacgagcagcatttcgccatgatcggtgaacgcacgggcaacgtttaccgcatcggagacgaaatcacggtcaaagtcgtcgacgtcaataaagatgagagaaacatcgactttgaaattgtcggcatgaaaggcacccgccgtccgagagaaacaacaggcgaccgcagaaaacgaggcagaccggcgcggaaacgcgtgttaaacagcaataccccggcttcaccgccgaaatcggaggaaaaaggggaatggtttacaaaaccgaagaagaaaaagaaaaaacgcggcttccaaaacgcgccgaaacaaaaacgcaaaaagaagaagtaaatgcgaaaagcaaatagggcataatgctctgtttgctttctttcgcaagccgcattttcattgtcgcggaacgctccatttgctaaaataaagcgtatcgcacacatgaacggtttttgcggagagaggaggataaggcatgccaaaaggatcaggcaaagtattatcgcaaaacaaaaaagcaaaccatgattactttatagaagaaacctatgaaacaggcatcgtgctgcagggaacggagattaagtccatccgcgccggccgcgtaaacatgaaggattcctttgcgaaaatcgagcgcggcgaagtgttcctccacaacatgcacatcagcccgtacgagcagggaaaccgctataaccacgacccgctccggacgagaaagcttttgatgcaccggaaagaaatcaataagctgatcggcctgacgaaagagaaaggctattccctcgtgccgctgaagctgtacttgaaaaacggcttcgccaaagtattaatcggcctcggaaaagggaagaaaacatacgataaacgtgaagatttaaaacgaaaagacgccaaaagagaaatcgaaagagcgttcagagacagacaaaaaggcttctgatgcctgagccttgatgtgatgatatgccctgtgctatactgttcacacatcagattcacaggctgtttattgaagatattcccaattgaatttgcctgtgatcatggtataataacagtacagccagttgagcaagagcttgatagatctcccgtatacccttaacaaggggacgttacggattcgacagggatggatcgagcttgagctgcgagccgagaggcgatctcgttaacacgcacctaaatataactggcaaaactaaaagttttaaccaaaacttagcactagctgcctaataaacgcagcgagctcttcctgacattgcctatgtgtccgtgaagagcacatccaagtaggctacgcttgcgttcccgtctgagaacgtaagaagagactgacagactagctctcggaaggcccgcccgcaggcatgaagacgagtgaaacacgaaatatgcaggctacgctcgtagacgcttaagtaatcgatgtttctggacgtgggttcgactcccaccgtctccatacataacagaggaaccgcagtgccgtcacatgacgcactgcggtttttttatgccgacaaaaaggagtgaatgtaaatggaaatcgtcatcatagacggaaaagatgttacaagcacagaagctttacaccgaatcttaaaagatcaattagatttcccggacttttatggtgaaaatctgaacgccttatgggattgtctgacaggctggatcgaacttccgctgactttggtgtggaagaattttgagatcagtcagaaggaattgggttcggatgctgatgatgtcttggagctgtttcaagaggctcaggcagaattagatggtgaatttttcattcaaattgatcagccgtcagccgggacaacggacaggcactaaaaagtgcgtacttcccctcatccatttttctatccgataatagggacggaaggtttcaggctttcgatttctgtccatatataagaagagacttgcgatagggaggaatggatgatggacttgcagttgaaagggaagacggcgcttgtgacgggatctacgtcaggcatcgggaaggcgattgcggcttcgctgattgcagaaggtgcggccgtgatcattaacggccgccgtgaagaaaaggtgaacgaaacgatccgggaactagagaaacagacgccggatgcccgtctctatccggccgcgtttgatttaggcacggcggaaggatgcggcgcgatttttcagcagtatcctgatgtggatattctcgtcaacaatttaggaatctttgaacctgcggaatactttgatattcctgacgaagagtggctccggtttttcgaggtgaatatcatgagcggcgtgcggctgacacgccggtatgcaaagcggatgattgagcggaaggaaggacgggtgatctttatcgcgagtgaagcggccgtcatgccttctcaggaaatggctcattacagcgctacgaaaacaacgcagctgtcgctgtcacgcagcctggccgagctcacggaagggacgaatgtgacggtgaatacggtcatgcccggctccacgaaaacagagggcgtcgaaacaatgcttgagtcgctttatcccggtgaaaacttgacagcggctgaagcggagagacgatttatgaaggaaaatcgtccgacgtccatcattcagcggttgatccgtccggaagagatcgcccactttgtcgcctttttaagcagcccgctgtcgtctgccattaacggatctgcattgcggatcgacggcggcttggtgcggagcattatataagatgaacataaaaaacccccgcaaagtggcgggggtttttttaatgcggatcacgctgaaaccggctgatgatcctgctgattaaatcttttgttgcacagtcaaagtgctcttctttttggtttgtcaaaagcccgacaggcggtgaaattgttaagttatggatcggaatgaccttcgtgccctcgatcggctctgaatgcgccgtcgccgtaaagattgagacgccgatattttccctgacatagtattgatgagccatgctgctggtcagctccatttttcgatagcggctcccgatggcccgctgcaggtgctgttcaatttgaatccggatcgggcaattggcgggcgtaaaaatcaggcattcattttctaaatcttcgagattaacgcttgctttggcggcaaggggatgtctgtctgacacgatgacattgagcgagtcatggaaaaacggatcgaaataattttccagaatcagctccggctcgccgcataccgcaaaatcaatagcgccctccagcagtttgcggctgcatgtattggcatcatccacgctgacattgaccgacatgtccggataatcatttaagaaaccccgcagcacggcagggaagatcaggcttgccgtcggttcggatatgccgatctgaataaggccggcctggccctgtctgatatcggccagagtatggtcaagcacctcgtattgcgcgagaagctgcccggcccgctcatgaaacagccgccccgcccttgtcagcttcagcttctttccacgttcaaacagctgcgcgcctacatcctgttccagctgtttaatccgcattgaaatcgtcggctgtgagtagttcagaatttctgcagccttataaaagctgcctgactgtacgatggtatgaaacgttttaatggttcgtagttccaacgaaatcccctcccggctgttcattaattttcttgaacctttcctttactttttttgattagtcaaacaaatcagtttgctttatagtataaacaatcaaagcttagtaaacaaattggaattatatattttttgcggggagagtgaccggaatgagtgaagacatatttcgattggctgagaaaaaggatgcgccggagtttttagagctgctgtacagcgcgtttcagccgatccgcaatttggagattgactggccgtcggcgcgggccgacatcgatatggtaacggaaaatattgaaaatcattcagccgtcgtgctcgaacgggatggacggcttctttcaaccattacgatccgttttccgtgggagagtgacacgcctccgtcaaaatatccgtttgtctggtggtttgcgacgcttcctgagctgaaggggcagggcatcggcagcaaacttttgacttatgtggaggaacatgtgctgcgggatacgctgaaggccccggccatcacgctcggcacttcggcgcgcaagcatccctggcttgtagatatgtacagacggaggggatatgaagtgtattttgagcaggagaaagacggagacatcggagttatgatgagaaaggtgctcataccggagcggtttgacgcgtcgctgttaggcacaccgagctgggcgcaatgatcaaaaaacggatcagagccggctgtctgcttctgctgctcggcgtgctggccgggtgcgggcaaggagaaagcgcaaaagcggggagcggcgtgcagaccgtcatcgtcggcacgggaactgattttccgaacattgcttttatggatgaaaaaggcgagctgaccggctatgacattgaagtgatgaaagccattgatgaacagctgccgcaatacaaatttgtctttaagacgatggatttttcgaatctgcttacaagtctcggaaaccggaaaattgacgtgatcgcgcacaatatggcgaaaaacaaggaacgggagaaacgctttttgtatcacaaaatcccgtataactactcgccgatgtacatcacggtgaaggcggataatgacgcggtacgcacgctccgggatttaaaagggaaaaccgtcatcgtcggcgcgacgtcaaacgcggcggattatatgacggcatacaacaaaacccacggcagcccgatacatttgaaatacgccgggcagggcggcaatgatacagcgaaccaaattgagacaggacgcgctgacgccaccgtatccacgccgtttgccgtcgattttcaaaataagacgcacgcgttcaaacaaaagacggtcggtgatgtgctgctcgataccgaggtgtattttatgttcaataaaaacagccaaaccctggcggacgatacggatcgggcgattcaaaggcttgtgagggacggcacattgaaaaggctgagtgaaaaatggctcggcgcggattattcaaaatcaagtttcacgaaataattgaagcagaaaacggggcgatcacatgaaaataagattggcggtcatgtcattaacaattgcggcaacggcggcgttatcagcctgcggcgcgggaggggaggcggcatcaggcaatcagaaaaacgtgaagaacattacggtcggcacggggactcaattttcgaatatttgctttattgatgataaaggcaaattgacgggctacgacgttgagctggtgaaagagcttgacaggcgcctgccggactatcgatttacctttaaaacgatggatttctccaacctgcttgtcagcctcggccagcataaagtcgatatcgtggctcatcaaatggagaaaagcgccgaacgggagaaaaaatttctgttcaatcaagtcgcgtataacaacttcccgctgaaaatcacggtgctccaagataatggggacattcacggcattaataacttgaaaggaaagcgggtcattacaagtccgacgtcaaacggcgcgcttgtcctgaaaaaatggaatgaaaaacacggcagtccttttgaaatcgcctatgccggccaaggttcaaacgatgcggccaatcagctgaaatccggccgcgccgatgcaacgatttcaacgccgtttgctgtcgattttcaaaacaaaacgagcgcgatcaaagaaaaaacggtcggcggggtgctgtcaaatgccaaagtgttctttatgtttaacaaaaatgaacaaacgctgagcgatgacattgataaagcgctcaaggaaatcattgatgacggcacgcttaaaaagctgagtgaaaagtggctcggcgcggattattcaagggagcaatattaagtgaaaaagagagggaccggcaatggaaaaagcgtttgatatcagtatgatcgcgtcctttgtgccgacattgctcgggtatttgcccgtcacgctgtatatattggcggtgtctttgctgttcggctttctattggggctgcttttggcgctgccccgcatctatcgcattcccgttttgaatcagtttgcgaagctgtatatctcttttttcagaggaacgcctatcatggtgcagctgttcattgtattttacggcattccggcgctcacggcgctcgccggaattgatacctctaaaatggaccctttgtatgcggccatcgccacgtatgcgctgagcagcgcggcaagagcggccgaaatcatcaggggaggtgtgaacagcgtcggccgcgggcaggcggaggcggcgttcagcatcgggctgaacagagggcagacattccggcgcatcattctgccgcaggcgctcgtgcaggcctttcccaacatcgggaatatggtgatcggtttcttaaaagatacatcactcgctttttcgatcggggtgatggatatgtcgggcagaggacagaccttgattacatcgagcaatcattctcttgaagtgtatatctcgctgtctgttctgtattacgcggccgcccttttatttgaatgtgtcttcagatgggccgaaaaacgaatcaagaaagatgagacgcgccttgtgacggtttttgacatgagtgcgcacggctgaaaaggagggagaacagtggagctggacattccgtttatcggcactgcgataaaacaaatgttgaaaaccgttccgcttacattggcgatgacgatcattccgattattgccggatttttcatagctctcggcaatatcacggtgcgtatattccgcatcaaatggctgctggcctgctcagcgttttacgtgtcttttttccgcagcaccccggcgattctccatattatgctgatttatttaggggttccgctgattgccgatcaattcagccgcgcgtttcatctcggctggtcagccaatcagattccggtcgccgtgtttgtcatcatggcactgtcattaacggcaggcgcttatatgacggaaattctccgatccgggatcatggccgtcgatacggggcaggcggaggcggcatattcaatcggtctgacgcggggccagttgattcggcgcgtaattctgccgcaggcgttcatgatatcgctgccgaacttcaccaatataggcatcggctttttgcataccacttccatcgcggcaattgttgcagtgcctgaaattacaggaacggcgacgattgcggcatccgataactatgcgtttctggaagcatttatcggggcggccgtgatttattggggattaacgctgattctcgaagctgtaaacagtctggcggaaaaaagagcggccagatatcaaggaggcgcattatgatcgaaatccgaaacattcagaaatattttggcagtcatcacgtgctaaaggggatcaatttaagtgtccggaaaggagaagtcgtgaccatcatcggcccgagcggttccgggaaaaccacttttctgcgctgccttaatttgcttgagcggccggatgagggcgccatttcgctgcacggtgaagtcattaactgcaaaaagcctgccaaaaaagacattctcagactgaggaaacagacagcgatggtttttcagcaatatcatttgttttcgcataaaacggcgattcaaaatgtcatggaaggcctgacggtcgcaaggaaaatgaaaaaaacagacgcgtacgccattgccgagcgggaactggccaaggtggggcttcaggataaactacacgcctatccgaatcaactgtcgggaggacaaaagcaacgggtcgggattgcccgggcgcttgccattcatcctgatgtgatgctgtttgatgaaccgaccgccgccctcgatccggagcttgtcggcgaggtgcttgaggtgatgcttaacattgtgcggaccggcgctaccatgatcattgtcacacatgagatggaattcgccagaagagtgtccgaccgaattgtgtttatggatgaaggagcaatcgtggaacaaggaacgcctgaggaagtttttcacaagacgaaaaaagaaagaacgaagaagttcctccgccgcgtgctgcctgattacggttatgacataaaagagcgcataaaggagcctgtcgtatgattcgtttaagcattttagatcaaagtgtcaccgcggaaaaccaaaccgcagaagaagccttgcggcaaacggtgaaattggctcaggaggccgaacaatacggatatgaccgtttctgggcggcggagcatcataacaatgaagagatagcgggatcagcgccggaaattgttctggggtatcttgccgcaagcacgaaaaaaatccgtctcgcatcaggcggggtgatgctgcagcattacagtccttataaagtggcggagcagttccgggttctgtccgcccttgctcccggccgtgtggcgctcggtgtcggcaaagcgcccggcggatttcagctgtcaaccgatgcgctgcagcgggagcttatccagcccgcccgtttgtttgaagaaaagcttgaggagctgactcatttcattcgaaatgattttccggactcgcaccgctacgcgtcattgcggccgacgccgcatactgagtatgcgcctgacatctttttgctcggcagcagcgcggaaagcgcgatatccgcggccaaactcggcatttccttcgttttcgcctatttcataaacggtgaagaggctgcgttagaaaaagcgcgccacgcctttgacgagcatctgccgaaaggatcgaaggcggaatttcaccttgcgccgatggtatttaccgcgcatacaaaagcagaagcggaaaaacacgtcgtatcgcgtgagtcggtcaaaatcattctcgaagacggcaaaaaggtgaatgtcggttcccgggaacaagcggaagcgtttctggaacaagtcacgcagccatataagctgatcacacaaaagacgggtgtgattgccgggacaaaagaagagaccgccgccgagctgagacgattatccgttcaatacagcattaccgattttgtgattttgtcgcctatcaaaaacgctgaggaaaaacgattgtcttaccggctgttaagcgaagcggtgcagccggccccacaattataggagggatgaacatgagtcatgaagtaaacgtagtggtctggagcaaacagggctgctcctattgcgatgaagtgaaaggatatttgcgggaaaaagccgttgcatacgaaacaattgatgtgacagaacgggacgaattgcgtgacgtgctgcagacgaagtacggcatccgtcatgtccccgtcgttgaaatcggcagcggtgacagccgtgtgtatcaggccgttactcaagtcggcattgatcatgtagaacgggcgcttgccgattacgaggggaaaaagggggagagaaaatgagccggacggatctaattcaattcggagccatgattcacggtgtcggcggcacaacggacggctggcgtcatcccgacgccgatccgacagcaagcacgaatgcggcgttttacaggcaaaaagcgcagactgctgaaagagggctgttcagctttgcttttattgcggacggcttgttcatttctgaaaagtccatcccgcatttcttaaatcggtttgagccgatcactattttatcggcgcttgccgcctctacaacccatcttggtttaatcggcacattttccacctcgttcactgagccgtttaccatcgcaagacagctgatgtctcttgaccatatcagcggcggccgggcgggctggaatctcgtcacctctccgcaggcgggagccgcgcgcaatcacagcaaagaaagtcttcccgaccacagccggcgctacgacatcgctcaagaacatgtggacgtggtgcgcggtctgtggaattcctgggaagaagatgccttcgtccgcaacaaagaaaccgggcagttttttgatcctgacaaactgcatcgcctatatcataaaggcgagtattttcaagtggagggcccgctgaatatcggccggtccaaacagggagagccggtcgttttccaagcggggtcttcagaaaccggccggtcgtttgccgcgcgtaatgccgatgcagtctttacgcactccaattcacttgaggaaacgaaagctttttatgatgatgtgaagaagcgggcggcggattacggccgcgacgcttccaagctgcggatctttccgggaatcagtccgattatagccggttcacaagaagaagcggaagcgaaatatcaggaattcgccgagctgataccgatagagaacgccattaaatatgtggccagattttttgacgattatgatttgagccgttttccgctggatgagccgtttcctgatttgggcgacgtcgggaaaaacgcgtttcaaagcacgacagaccgtatcaaaagagaggctaaagccaggaatcttacgctgcgtcaagtggcgcgcgaagccgcgtttccgcgaacgaactttatcgggacaccggaacgtgtggcatcattaattgaaacatggtttcagcgggaagcggcggacgggtttatcattcactctgacatcccgggcatgcttgaagcctttgtggatcaagtcataccgatccttcagaaaaaggggctgtaccgaaaaagctatccggcggatacattgcgggggaatctcgggttggatattccgatctgcaaaccaaatccgattttgagcagaaactaaatgtttctgctttttctgctgcttgccattcccgtcattacagccttttttaaaaaatatactgatttcgagatattattgttgcgaaaagaattttttgtaactataattattacagaactgatcagtataaaaaaacattcatatttcataataaatgtgtgtgtaatttgaaaacgaaagggctgtttacaatggcaaaagtactttatatcactgctcatcctcatgatgaaaagacatcttacagcatggcgacaggaaaagcgtttatcgattcttataaagaatcaaacccgaatgatgaggttgtacatatcgacctttacaaagagaacattcctcatatcgacgcggatgtattcagcggctggggaaaacttcaatccggcacaggatttgaagagctttctgaaaacgaaaaagcgaaagtcggccgtctgaacgagctgagcgatcaattcgcgtcagctgacaaatacgtattcgtcacaccgctttggaacttctcattcccgcctgttatgaaagcgtaccttgattctgtggctgtagccggaaaatcattcaaatatacagagcaaggcccgatcggcctgttgactgacaaaaaagcgctccacattcaggcgcgcggaggctattactctgaaggcccggcggctgacatggaaatgggccaccgttacatcggcatcatgatgaacttcttcggcgttccttcttttgacggtttaatcgttgaaggccataatgctgaaccgaataaagcacagcaaattaaagaagatgcgattgcccgcgcgaaagaagccggaaaatcattctgatcttaaaaaaaacctccccgccgtacggctgggaggttttttatattaaagggcaatcgtccgtttttgctcgctgcttttcatcgccgcttcaatgacacggatgacatcgatgccttcttttgccgtaacgggaagctgttttccgtttaagatgctgtccgccagcagtttgtagtacgtaaggtaagagccgttctcagaggggattgtttctgtatgccttttttcatccgctgcgattgtcagctctccgaagttgtcagggtcatcggcgccccagctgtcgtcaatcggcttttggccggctgaaagcgcctcttcctgtccgtcctttccgtatttgataaagcttgcattccgtccgtgaatctgatagcgcgggccgtttgccgcattcatagagccggattgaagaatgacctgaagtttgccgtaatggagcgcggccagaaaataatcgacggtttcactgttgtcccgctgtttcatcacatgtgccgtgacggattccggcattccgaaaagcaggagtgtctggtcaataatatgtgaaccgagatcatacagcgttcccgtggcgggtccgcttttttcgcgccatctttcttggacaaccggattgtacagatcgtagttgacttgatatgtatgaatgtcttgaagcgccccgtcccgaatcagcttttgtatcgttaaaaagtcattgtcccagcgccggttgtggtacacgctcagtaagacgcctttatcttcagccgttcttctcagttcctccgcttctgctgaagtcgccgtcatcggtttttccacgacggtgtgttttcccgccaggagacatttcatcgctgattcataatgcattccgctcggtgtcgtaacgatgacgagatcaatgtcaggatcaccggtaatgtcttcaatcgcgcgcacggcttcagcccccggcagatcacgtctgacctcatccgttctggaggtcatgacttttttgatctgataatcatcaaggacgtccaaaagcggcgcatgaaagactttacccgacaaaccatatcccaatatgccaacctgtatcgttttcaatgaatttccccctcttgatatgtgataacattatataccccgcgggtgtactggtaaaacttgtgtgttgaaaattttttacaccggattttcaagtctgtataatgaagataacgaagaaaaaaaccgaggtggaaaatggacaaacataccgagcatcaatcgttaaatcataaaagcgccaaggaaaaagaccagattctgaaccggctgaaacggattgaaggccaagtcaggggcattcagaatatggtggagaacgaacgatactgcgtggatattctcgtgcagatttcagccgtgcaggcggccatgcagaaagtcgcgtttcatctgctggaagatcacgcccatcactgcgtagccggcgccattgagagcggaaacggggagcaggcgattgccgagctgcttgatgttgtgaaaaaaatcgcaaaatcgtaaaataaaatgttttgaaataccctacaggggtatggtaacataaaaaagaaaaaacaagacgtggagggaatcatcatggaacaaaaaacactgcaagtggaaggcatgtcctgtcagcactgcgtaaaagcagtagagaccggagtgggagaactgaacggagtgacggcggttcaggtgaaattggaagccggacaggtggatgtgacgtttgatgagcacaaagtctccgtatcagatataaaagacgcaattgaagatcaagggtatgacgtcgtataaggtttatcgcgctgcgggaacgggcgcggttttcttttatcataattataccctcgtggggtttatgaagagagatgaggacattgagtgaaccgaaagaaatgaccattcaagtggggggcatgacatgcgccgcctgcgcttcaagaattgaaaaagggctgaaacggatggacggcgtcaatgacgcttccgtcaatcttgcgcttgagatctcaaatatttcctatcagcctgacaaaatcgaagctggcgccataaaggataaaattgaaaaactcggctatcacgtcgtgacggaaaaagccgattttcagattgaaggcatgacgtgcgccgcttgcgccaaccggattgaaaagcgcctgaacaaaacagagggcgttgtgagcgcaccggtgaatttcgccctggaaacagtcaccgttgaatacaatccgaaagaggtgacgccgaaagagctgaaagagaccgtggcaaaactcggctaccgattagacgggaagaaagcggttgatggagacggcggattatcccaaaaggagaaagagcagcgaaagcagctgatcaggctcatattttctgccgttctctcctttccgcttttatggtcgatggtcagccatttttcttttacttcttttatctggatgccggatatcctgatgaatccgtggctgcaatttgcgcttgccaccccggtgcagctcgtcatcggctggcctttttatacgggagcgtacaaggcgctgagaaacaaaagcgccaatatggatgttctcgttgcgctcggaacgacggccgcttacgcatacagcctgtacatgacgattgcgtctctcgggcgagacggacatgctgaggggctttattatgaaacgagcgccattttgctgactttgatattgcttggaaagcttttagagatgaaagcaaaaggccgctcatcagaagcgattaaaaagctaatgaagcttcaggcgaagacggcggcggttgagcgggacggcaaagtacaggtgattccgattgacgaggtccggacgggggatatcgtatacgtgaaacctggagaacgcgttcctgtcgatggcgaagtgattgaaggccattccgcgattgatgaatcgatgattacgggagagagcatgcctgtcgataagtctcccggaagcaccgtcacaggggcgacgatcaatgcaaacggctttctcaaaatcagagcggtgaatgtcgggaaagataccgcgcttgcacacattattaaaattgtggaagaagcccaaggatcaaaagcccccattcagcggctcgcggatcacatttccggcattttcgtcccgattgtgctggggctggccgtgctgacttttctcatttggtatgtatgggcggcgccgggacagttttctgaagcgatcggcaaattcatcgccgtgcttgtcattgcctgtccgtgcgcactggggctcgccactccgacgagcattatggcgggctccggccgtgcagctgaattcggcattctctttaaaggcggtgagcatttagaaaagacccagcgtctgacgacaatcgtactggataaaacaggaacggtgacaaacggcagaccggttctgacagatgccgtaccggcagagggaatgaacgaagaggaactcctgcggctggcggcggccgccgaaacgggatcagagcacccgctcggagaagccatcgtgtcaggagccgaaaaacgggggatttccatcccgaaactcacccggtttcaagcccggatcggttccggaatctatgcagaggctgacggcagaacgattctagccggatcaagacggctgatggaatcagagcatattgaacatgaagcgctgcttccgcaaatggcccgcttggaggcggaaggaaaaacggtgatgcttattgcggcagacggcaaagcggcggggcttatcgcagtcgctgataccattaaagaaacatctccggccgcggtgaaacgtctgaatgatatggggcttgacgtcatcatgatgaccggtgacaacaaaaagaccgcggaagccattgcaaaagccgcgggcatcggcagcgtgatcgccgaagtgcttcccgaacaaaaggcggcggaaatttcccggctgcaaaaagaaggccggcgcgtggcgatggtcggtgacggcatcaatgatgctccggcgctggctgtggccgatatcggaatggccatcggcaccggcaccgatatcgcaatggaagcggcggacattacgctgatccgcggagacctgaacggcattgccgacgccatcggcatgagccggctgactatgagaaacatcaagcagaatttaggatgggcattgggctacaacagcatcggcattccgattgcggcagccggctttctggctccgtgggtggcaggcgccgccatggcgttcagctcggtatcggtcgtgcttaatgctttgcgtttacagaaggtgaaaaaagacaaaatcggctgatgccggttttgtcttttttattgacactttattcaaagcctgcatataatagagaaaacacttatatgagtatatgctcatatatataaattcgtttacctgtattgatgttatgggaatcctattacggaaagtagggtgagtcgaaaatgaaagcagccaaaggtgaatttgtattagacggacttgattgcagcaactgtgcaaaaaaaatagaaaacggcgtaaaagccattgacggcatagacggctgtgctgtcaattttgcggcaagcaccatcacggtctcagccggcgggaaaaacgagcaatggatgaaagatgaagtcgcgaaaaaagtaaagtccattgatcctcatgtgaccgttcgttcgaagcacgaagacaaacccggtgaggatgaataccgcaaaaagctgcagctgatgttagtgagattggcggcgggcgccgttttggccgtcatcgcttacttcgcgcacacgggcgccgtccttgagtttctgctcttttttgcttcatatttgatcatcggcggcgatatcgtagccagagcgggaaaaaatattgtccgcggccaggtatttgatgagcattttctgatggcgcttgccacaatcggcgcatttatcattcatcaatatccggaaggcgtcgcggtcatgctgttctaccagatcggtgaattgtttcagggagcggccgtcagccgatccagaaaatcgatcagcgcgttattggacatccgtcctgagtacgccaatgtgaaaacggaaaacggcatggctgccgttcccccgcaggacgtcaaagtgggacaggtcatcatcgtgaatcccggagaacggattccgctggacggaaaggtgctgagcggttcctcgatggttgatacatccgctttaacgggcgaatccgtgccgagaaaagcggagccggggcaagaggtgatggccggatttatgaatcagaacggcgtgcttcatattgaaacctctaaagggtatgaagactctgccgtgtcaaaaatattgaatctggtcgaaaatgcggccggacgcaaagcgaaaacggaaaactttattacgaagtttgccaagtactatacaccggccgttgtcattgttgcggtgcttctcgcctttttaccgccgcttctcgtgccttcagccgcgctatccgactgggtgtaccgcgcgctgattttccttgtgatttcttgtccgtgcgcactcgtcgtctccattccgctcgggtttttcggcggtatcggggctgcgtctaaagcaggggtgctcgtgaaaggcagcaactatttagaagcgctcaatcaggtggcatacgccgtgtttgataaaacgggaaccttaacgaaaggcaatttcgccgttactgatatcaaaccggcggcaggatttacgaatgacagcctgcttcatgcagccgcgcttgcagaagtccattccaatcatccgattgcttcttccatccgcgaagcttacaatcaaccgctcgcggctgaggagattgaagaatatgaagaaatacccggacacggcattcgggtgaaaaccggcggatcaacgattttggccggaaatcaaaaactgctggcaaaagaacaaatcgcttccggcacagctgaaaataacggaaccgtcgtttatgtcgccgtggatcagcagtatgcgggggcaatcgtgatcgccgatgaaatcaaagaggacgccaaacaggccattgccaatttaaaagcgctcggcgtgaagcggacagtgatgctgacgggtgattcaaagcagaccggagaagctgtcggcctcgagctcggtattgatgacgtgtacacagagcttttgccgggtgacaaggtagaccgcgtcgaagaacttgaagcggcgctttcaccgaatgaaaaactgatgtttgtcggcgatgggattaatgatacgcctgtgcttgccagagctgacatcggagctgccatgggggctctcggttctgatgccgccgtcgaagcggccgatgtcgtcctgatgacagaccagccgtcaaaagcagccgaagccatccggattgcacgccgcacacgccggatcgtctggcagaacatcggatttgctttaggcgtaaaaatcatttttctcttgcttggcgcattcggattcgccaccatgtgggaagcggtcttttcagatgtaggcgtcacgctgatcgccgttgccaacgcgatgcgcgtcatgagagtgaaagcggaataattgtcaaagataattcgtttttcagggttttcttaaacaaggttgtcttggtaaaatagagaagcgggccatccggcatccgcttcttttttattttaaaaacaatgaggtgtctgagtgaaaaagaaacaatcgtctgcgaaatttgcggtgattctgacgttaatcgttgtcgttttatttgcggccatcgtaattattaacaaccaaacggaaaaagcgggcgaaacagtcgccgaacagccttccattaaaggacagcccgtgctcggcaaagacagcgcgcctgttacggtagttgaattcggagattacaaatgtccgtcatgcaaagtatttaacagcgatatctttccgaaaatcaaaaaagattttatcgataaaggcgacgtgaaattttcatttgtgaacgtcatgtaccacggaagcggctcgcgtctggcggctcttgcttcagaagaggtgtggaaggaagacccggcatcattctggactttccatgagaagctgtttgaagagcagccgtcaagcgaacaggaatgggtcacgcctgcattgcttgaaaaaacggtcaaaagcaccgcgaaaaaggttgatcctgacaagctgaaggaaaaccttgataaagaaaccttcgcaaaagagctgaaagctgacactgacctgaatgataaattaaacattacggcgacaccgacgatttatgtaaatgacaaggtgattaatgacttctctaaatatgatgagatttcaaaaacgattaagaaagagctgaaaaatgaaaaatagaatcgtgtttttatatgcttcttgggtgatagctcttgctgccatgctcgtcagcctttatttcagcgagatcagaaaattcataccgtgcgagctgtgctggtatcaaagaattctcatgtacccgcttgtcctgattttaggaatcgccaccttccagggtgacacgcgcgtgaaaaaatatgtgctgccgatggccgtcatcggcgcatttatatcgaccatgcattaccttgagcagaaggtgcccggtttcagcggcatcaagccgtgtgtctacggcgtgccttgctcatctgaatatattaactggttcggtttcattaccattcctttcttggcattgacggcatttattctcattattatctgcatgtgttttgtcaaaacggaacgcacggcaaaataaagagcctgctccatgggagcggctctttttctattatttgtaccaagctttgtttgtcgcaatctgtctgttatgggagctgtcccaaatatccacggaataggcataatcataattcatgacgcagcggatgccgctgccttgggcgtcatgctgaagtccgaagttatgggaaaactcgtgctgtgccgctttcgccgtgttggccgttccttgatcaaggttcacgctgaaagccgggccgctcggtttgccgttatatacatacgcgataccgccggcgtcaaaactcgattttgcggtaaaaccgacgacaaaatgataattttgatttctgaagctgctttggagattcgataaaatctgagaactgtttgagccggaagaattccaagcctgcacggcctgtacgacgaaatcaatgttgtgatcacggttaaaagcgacatccgcctgctccacgatctggacgattcgcgtttgccagtcgctgtatttggcgcggtattcagcgtccgccaccgccagcactctgaccttctgggagcccgtgctggctttagttgaggctttatcctgactgacattggcattgaatcgtttcgtgccggcctgcttgccgttctcatccagaatttttgtgtcaaccgtctgttcaacttggaccgggcctttcagatctttaaaatgatcggctttcggaagcgggtccgtatacaccgttttcgccggctccgcatgagtgtgcgaatgcgtatggctttcggctgacggcaggccgggaattaatccggcggccaataaaacaggaaaaacaagtgaactgattttcatctcataaccccctttttgttagagaaagtattcaatgaaacttccaataaaccttccattaaagtataaaataggaaaatattcttgctttcagccgttgcggatgaggttgtcccggatcaggaatcagaatctttcaaaaataaggttgattttaagagaaagcgattataaaatctaatggtcgtcagaaaatttaacaaataaaaaggagcatatggaatggcctgggagctgcttagtgtaatcggcatcattgcgtttgcggtcagcggagcgattgttgcgatggaagaggagtatgatattttaggcgtgtatatcttggggattgtaacggcgttcggcggcggagccatccgaaacctgctgatcggtgttccggtctccgccttgtgggagcaaggcgcgttttttcaaatcgctctcgcatcagttacgattgtctttttgtttccgaagctgctgttaaggcattggagtaaatggggcaacctatccgatgccatcgggctttcggcgtttgccatccaaggcgctttatatgccgtgaaaatgggccatccgctcagtgcggtgattgcggcagcggtcctgaccggcagcgggggcggcatcatacgggatttgctcgcgggcagaaagccgcttgtgctcaaggcggaaatttatgcagtctgggccgcgctcggagggttaatcgtgggcctcggctgggccggggatgccgccggtttgtatgtgctgtttcttgtgcttgtggcatgccgcatctgcagttatgtgttcaggtggcgcctgccgattcgttcctatcatatagaacagtaaaaaaaccgatttcacaaacgaaatcggtttttttgcataacggcttctgataaaaaaagacgcccgatatgataagaaaaagggtatttgaccataatgctgaataatatgttgcatatatgtttgtatgatgaaagccggacttgtcagcttgatgtcggaggtgccgctgatggcaaaacgtgataaagagtggaaagaagagcaggaaagaatcaattttgtcatgaaggaactggaacagaaacaaactcatcttgaagcctcatcgggcggattgaagcaggatattgtcggcctgagaaaaacgttttgggatgatgtcaccgtgaatatggatgatgcccacgaagcggctgagacatttttaagcattaaacagcaggcggaaatgctttcagaacgtgaacggacgcatcggcttcaataccggcagcttcaaaaaatccaaaagctgaaaacctctccttacttcggccgtgtcgattttacggaaaaaggggagtcctcttccgagcggatttatatcgggctgacttctttaatggatgaaaacaacgagcaatttctcatttatgattggcgcgcgcccatctcatctctttactatcaatattccccgggaaaagcccgctatgaagttccggaagaaacgatagagggagacatcacactgaagcggcagtttatcattaaaaacgggacgcttaaagcgatgtttaacacggatatgacgattggtgacgaaatgctgcaagaggtgctgagcggccattccggacagcatatgaaaaacatcgtgtcaaccatccaaaaagaacagaacgaaatcatccgggatgaaaaaagcaaatatctcatcgttcagggagccgccggaagcgggaaaacatccgcggcgcttcagcgggccgcttacttgctgtaccgcgggcgcggggtgcttgatgcccgtcagattgtattgttttccccgaacattttgttcaacagttatgtgtccgccgtattgccggaattgggagaagagaatatggagcaggccacctttcaggaatatatcatccgccggctcggacgaaagtttgattgtgaaagcccgtacgagcagcttgaatattgcctgactgaacaaaataaggacgcactttccgtaaggctcgcagccattgcttacaaagcgtcatcagcttttcaggccatgattgaccgctatgccgggtcgctttcggtctcgggcctgaaatgtaaacagatcagcttccggggagacatcctgatttcaaaagagcggattgaagcctatttttattcgcttgatcagcagctgccgattccgaacagagcggagctgacggcggaatggcttctcgcggaaatcagcgctctcgaaaaaaaggagcgtaagaaggaatgggtcttgcaggagagcgagctgcttgataaggaagactatgctgaggtttatcaaacactcaagaagcaggcggcagatgatgaacctgcatttgacgaccatcagcgcgaacagcgcctgcttggcgccattattgtcggcaaagcctttaaaccgattaagcaggccgtcagacggctcggctttctcgatataaaacggatgtatctccggctgttttcagactggggagctgatgaaaagcccgatcattgggagagcatcggcgctttgaccggaaacgcatttgcagaacggtcgcttccgtatgaagatgccgctccgtatctgtatttgcaggatctgttagaaggaaaaagaaaaaacacacaaatgaagcacgtcttcattgatgaagcgcaggattattccccatttcagctcacgtatattcaaaccatcttcccggcggcaaagatgacggtgctcggtgatgtcagccagtcgatttatgcccataccattacgggcccttcttccctcgccggctgctttcgcaatggtgcagaaaagtatgtcagcctgaagcggacttacagatcgacgcggcagattgttgaatttacgaaagcgctgctggctgacggcgatgacattgagccttttaaccggaacggggaaaaaccgcgtgttttgcggacggatacagaaaatgcgcggcgggaacaattggcggatacaatccgggagctcagacaaaaaggctgggagacggtcgccgtcatctgcaaaacggccgcggaagccaaaaaagtgtttcaggcggtcagcgccgagagcggtgtccgtttaatcaataaagaaaaccagccttttcaaaaaggggtatgcgtcattcccgtttatttggcaaaaggcattgagtttgacgccgtcatcgccgctgacgcctctgctgcccagtacaatagcgaacatgaccgtaagctgttatatacggcctgtacgcgggcgatgcatcatttgaccgtattgtctccgggagaaccctctccttttataaaagaagtgcccgccggcttattcgtataagccctttgctgagtgcaaagggctttttatcattagtaatcttaatcgttgtcatcatgattatatattttacttacatacaaactttcggtaaagtttcaattagaatattattttgacaattcctatagaaataacgtacgttacgtttaattccttgtgaggtggatatcgttgcaacttcaggtcatgaacagtccgtttaatcaggagcaggcagagctccttaaccgccttctgccgaccttgacagaatcacagaaaatctggctgagcggctatttggctgcggcccggtccgaatccggtgaaacagccgcgcccgctgctcaggctcctgctgaaagcccggcagtctcgaaagaagtgaccgtattatacggatcgcaaacgggaaatgcggaaggtcttgcgaaacagacggtaaagacgcttgaggaacggggattccaggtcaccgtcgcgtcgatgaacgattttaagccgaataatctgaaaaaagtaaacaatttactgatcgtggtgagcacacacggagaaggcgatccgccggataacgcgctggcctttcatgactttcttcacggcagacgcgcgccgaagcttgaagagctccgttactccgttttggcgctcggggacagctcgtatgaatttttctgccagaccggcaaagagtttgacgagcgtcttcaagagctcggcggcacccagcttgcgccgcgggttgattgcgatcttgattatgatgagccgttttcggaatggcttgaagcggtcatcggcggtttgaacgaaggagcgggaaatcaaacagccgaagcgcctgccgagacgcccgctctcggtgaatccgtttattccagaacgaacccgtttcgggcggaggttcttgagaacatcaatctgaacggacgcggttcaaataaagaaacacgtcatctcgagctttcgcttgaagggtcgggcctcgcgtatcagcccggagacagcctcggcatctatccggaaaatgatccggcgctcgttgatgagctgatcaatgagctgaaatggaatccggaacaggaagtggcggtgaataaacaaggagagcgccgtccgctgaaagacgcgcttacttctcattttgaaattaccgtcttaacaaagccgcttttgcaaaaggccgcacagtttatggctgatcaaaagctgagtgaacttctggccgaaggaaacgaagagcagctgaaagcatacaccaacggccgtgatctgcttgatctcgtccgggatttcggtccgtgggaagcttccgcggaagactttctttcgatcctgcgtaaaatgccggcccggctctattcgatcgcaagcagtttagaagcgaatccggaagaggtgcatctgacaatcggagcggtcagatatgacgcgcacggcagagaacgcaaaggcgtctgcagcattctttgtgcggaaagactccagccgggagatacgcttccgatttacattcagcacaaccaaaacttcaagctgccggaaaatccggatacaccgatcattatggtcgggccggggacaggcatcgcaccgttccgttcctttatgcaggagcgtgaagaaaccggagctgaagggaaaacatggctgtttttcggggatcagcactttgtcactgattttctgtaccagacggaatggcaaaaatggctgcaaaacggtgttcttacaaaaatggacgtcgctttttcccgggattcggaggaaaaagtatatgtgcagcaccgcatgaaagaacaaagcaaagagctgtatgaatggctgcagcagggagccgccgtatacatctgcggtgatgaacagcatatggcgcatgacgtgcaccaggcgcttctcgatatcattcaggaagaaggcggcatgagccgtgaaaaagcggaaagcttcctggcagacatgcagcagaaaaaacgctatcagcgtgacgtatattgattttggtttgaaaggagcttattcagcatggtgaacaacattttaaaagcgccggaaggccctccaagtgatgttgaggaaattaaagaaaaaagcgattatttgcgcggcacattgaaagaagtcatgctcgaccggatttcagccggcatcccggacgatgacaaccggctgatgaagcatcacggaagctacttgcaggatgaccgcgatctccgtaatgaacgtcaaaaacaaaagcttgaaccggcttatcagttcatgctgcgtgtccggatgccaggcggcgtgtcaactccggaacaatggcttgtcatggatgaactggcgcaaaaatacggaaacaatacattgaagctgacaacgcgtgaaacgttccaaatgcacggaattttaaaatggaacatgaaaaaaacgattcagaaaatcaatgcggcgctgctcgataccattgcggcctgcggagatgtcaaccgaaacgtcatgtgcgcttcaaatccgcaccagtctgaaattcatgcggaagtatacgaatggtcgaagaaattgagcgatgaccttcttccgcgcacgagagcctatcatgaaatctggcttgatgaggaacgtgtggcgggaactcctgacacggaaacggaaccgatgtacgggccgctgtatttgccgaggaaattcaaaatcggaatcgccgtgcctccgtccaatgatatcgatgtcttttctcaagatctcggcttcattgccatcgtggaggaaggccgtcttatcgggttcaacgtggcaatcggcggcggtatgggaatgacgcacggcgatacggccacttatccgcagctttcaaaagtcatcggcttctgcaaaccggagcagctgtatgatgtagcggaaaaaaccattacgattcagcgcgattacggaaaccgttccgtcagaaagaatgccagattcaagtacaccgttgaccgtctcgggctggaaaacgtaaaagccgagctggaaaaccgcctcggctggcagctggatgaagcgaaaccttatcattttgaccataacggcgaccgttacggatgggtgaagggcgtaaaagggaaatggcactttacgatgttcatcgaaggcggccgcgtcacggactatgagaattataagctgatgacgggattgcgtgaaatcgccaaagtccatacgggagatttccgtctcacctctaatcaaaacctgattatcggcaatgtctcgagccagaaaaagaaacaaatcagcgcattaatcgaacaatacggtctgacagacggctggcagcattccgccctccgccgcagttcaatggcttgcgtcgcgcttccgacatgcgggctcgccatggccgaagccgagcggtatctgccgaagctgattgataagattgaagacattgttgacgaaaacgggctccgggatgaagaaatcaccatccgtatgaccgggtgcccgaatggctgcgcccgccatgcactcggcgaaatcggatttatcggaaaggcgcccggaaaatataatatgtatttaggagcggcgtttgacggcagccgtttgagcaaaatgtaccgggaaaatatcggtgaagaggaaattctgaatgagcttcgcaccattctcccgcgctacgcgaaagagcgtgaggaaggcgaacacttcggcgatttcgtcatccgcgccggcatcattaaagcgacgacagacggcacgaattttcacgaataagatgagctcttaaaaccaaggatagagacacactggcggtgcgttctctatcctttactaagcagcataaacgctgctccgcgtcatgaaacagatgacgcagcttgcgaaaaagcctgttttcagagaaaacaggctttttctttttccggaaaaaatgtagctgaaggcaaaaaaagttcgccgtgagcgcgttatgagaaattttaaataaaaacgggtaaaataaaaggagaatggttgcgtgcggaaaatatattgaatctgcccgatcatcggctccggcctttgacaagggcagagaacaggcaataatgatatgatgcagcagatgaaggaggtcagctttggacatatttttagtcgtactcgtacttttaaccattatcgcgatctcaaatatcgtaaatcggtttgtcccctttatcccggtgcctctgattcaggtggcgctcggtatcattgcggcgtcatttccgcaggggcttcattttgaactgaatactgaattgttttttgttttgtttatcgcgccgctgctttttaacgatggaaaacggacgccgcgtgcggaactttggaatttaagagcgccgattctgctgcttgcgctcgggcttgtgtttgccacggtgattgtcggcggttacacgattcattggatgattccgagcattccgctggccgccgcgttcgggctggcggcgattctgtcaccgactgatgttgtcgcggtcagcgcgctgtcagggcgtgtgaagatgccaaaaggcattctgcgtctccttgaaggagaagggctgatgaatgacgcatccggcctggtcgcttttaaatttgcgattgcggctgccgtgacgggcgcattttcgctggcgcaagccgcgttcagtttcgttctgatttcagccggcggtttactcagcggtgtcgtcatttcttttttgattatccgtttccggctgtttatgcggcgcctcggcatgcaggatgtcacgatgcatatgctgattcaaattctgacgccgttcgtcatctatctcgcggctgaagaaatcggcgtttccggcattttagcggttgtggccggcggcatcacgcatgcggtggagcaggaccgtcttgaatcaacgatggtcaaactgcaaatcgtctcttcaagtacgtggaatattattttgttcattctgaacggtcttgttttcgttattttaggtgcgcaaataccggatgtggtttccgtcatctttaatgataccgcgtttaacaatatgatggtcatcgggtacattatcgtcattacgctgacgttaatgattctcaggtttttgtgggtgctgtttttttggaacggcaagtggttttttaacaaggatcagagcatttataaacccggcctgcgctcgaccctgctgatttcggtttcaggcgtcaggggagcggtcacgcttgcgggttccttttccattccttacgtgctctctgacggctcaccgtttcctgaacggaatttgattctctttttagccgcgggcgttattttgtgcacattggtgctggcgacaatcgttctgccgattttgacagataagccggaagacaatgtgaaagaaaagaaagtcaaattgctgacagcgagacggaagctgataaaggctgccttaaccgccattaaagaaaatatgaatgagtcaaacaaaacggcttcttttgcggtcattgccgaatacaatgagaaaatgaaaaatctcaggtttcagcagttcaccgtcaaaaaccgcacgaaaaaagatgagcggaaagtccgcgcccaagggattcaggcagaacaggaagaattgctgcggctgattgagcggggcgacataccggaagaaacggctgacagccttcaggaacggtttgatgaactggaagtgctttatacgaacccgtttaaagtcggcttatctaagaaaaagctgaaacgcctgatgtactggatctttttcggcgaacataaaaaaccggaaatgtcgattttaaatgaagaaggcctcattcgctccacaagggttaaaacggcaaaagcggccattgaaagcctgaaaaaacacatgactgaagaaaataaagatgtgacgcttgccgtcatttccttttacaatcacttgattttcaggctggggcactcgtatcacgaacagagtccgagtcgccgttttgaaaatcaaaaactcgaaatcaaactgcgggccgtgcaggccatccgcaacgaaatccaaacattattcgaagagcgggaaatttcccgcgacatgtcgcatgagcttcgccaatacatcaatgatgtggaagcggccatgcttgacggagatgaataaaaaaagtccggcatctgttcgccggacttttttagattacggacgatggaattcgacgtgatcgccgtcgcggtcaaaccagcctctgaaggcccagttgatccagccgccatctcctttgttggtgaagcttccgtcttcaaacacccaaatgccgtacgtgatgccgtcataaacggcggaaccgtaaaactgaacgccgttaaaatgatcttcatattcctggcttaaattaaacaccatgacattatatttttgtccggaagcgtagaatgaagattccattaagtttttgacgaagccgtcacggttttgcgccgacttaatcgcgtcagcaatcgaattgccgatgccgagcaggtcaacgtcaatgtttaatccgacatcttttgctgagacatctgatgtttgctgagccatgttttgaggggccgggttttcttttgcggatacaaaggacagaggagtcagagacaaagcggcgccaagggcaacggacatcgggatacgcatacgtttcatatgatttcctccttcaattgtgtggtggctacagtagcgatttacccggacagttacctgattaaccgtaatttttgaaaaataggaaaataataacgtcagtggtgcttgggcactaaagatggtttttgtgataacgatgagcgtataattggtttcttacggcggaaatgtgagataataataaccgtttacataatgactagaaaggatggttcaacgtggcaaaaagcttaaaagatactgtaaagcttcataatggcgttgaaatgccgtggttcggccttggcgtcttcaaggtggaaaacggaagcgtagcggcggactccgtcgaagcggcaatcagaaacggctaccgcagcattgatacggcggctatttataaaaatgaagagggtgtcggcgaaggcatcagagctgcgggcgttgccagagaagagctgttcatcacgtcaaaagtgtggaatgaagatcaaggatacgaaacgacacttgacgcgtttgagaaaagccttgagcgcctcggcctcgattacctcgacctttacctgattcactggccgggcaaggataaatataaagacacatggcgcgctcttgaaaagctgtacaaggacggcaaaatccgcgccatcggcgtcagcaacttccaagtgcatcatttagaagaactgctgaaagatgctgaaatcaagccgatggtcaaccagattgaattccacccgcgcctgactcaaaaagaagtaagagatttctgcaaagcgcagggcattcaagtggaagcgtggtctccattgatgcagggacagctcctcgataacgaagtgctgtcacaaattgcggaaaaacataacaaatcggttgctcaagtgattttgcgctgggatcttcagaacgaagtcgttaccattccgaaatcgattaaagagcaccgcatcatagaaaatgccgatatttttgatttcgaactgtcacaggaagaaatggaaaagatcagcgcattgaacaaagacgagcgtgtcggcccgaatccggacgagcttctgttctaagaaaaaacagccctttacggggctgtttttctttacataaatgtctgtgtctgacgttttacgctgaacctgtatgcggctattaataacagggcggcggcgaaggctcccaaaatgatgatgttcagcgtcaggctttggagcgtgcggccgtgctgcaattgatcgaccgtatcaagcacccagcgctgaggcagaaattcggcgattgtctgcactgttttcggcataatattgcccggaaaaaagcagccggcgagcaagcatgtcggtacaacgatcaagttcaaaagcgccgatgccgaagagctgctgttggaaaaaccgacggcaataaaggcgatcccgattgcgcttaatgcaaacagcatcatcaggacgaacagctgccacagcgggaatgacggatgaatatgaaaagcggcgcccataaagagaacggcgaatataatttggacggccatgataatgatattcactgccgcattcgccaatacatactgctttgacgtgatcggcgttgacagaagcctgtagtacgtcctgttttctctctctttaatcatcagttccgtcaggttgccggcggaatagagcataatgataatgagatacccgatgactgagtaagtcatttctttatggttcgaagtatctttcaaaacagcggactccgtttgaatcggagaatgcttgaaatcggcgtacatcgcctgaaaggctttctcgtctccgccggaagatttgccgattgaggcggcgctgttcatataattgtacaaataagagctgacatatccggtgacctgggcgcccttcagcgaggtcatgccgatgtgagacggtttcccgtcttttacgctttgggagaagcctttttcaaacgtaatgagcgcctccatttttcctgaagcgatctttgatgaggcggacgcatccgtttcctccgaaatcttcacatgatccagtccttttaaaaacgtgaccgtatcctgtgccacttctccgccgtcctgatcgagaatgccgatattgagcgtttcggctccgccgttggcattggtcatgaaggagaggaagacgccgatcagcggagccccgatataaagaatgagctgttttttgctttttgtaattcctttgagagtgtgtgcaaacagccaccagaagtttttcatattacagtccctcccgtctttgaaacgtaaatgcggcgatcagcaaaaagagtgccgccaatgctgtatttaaaccgagtgcaggccatgccgctgatacatcatttgcgtaaatgatgttgttaatcgccttattgatccaggataagggcgacagggcggaaatcccccctccttcatatttgtaataggcgccgccgataatggacatcacctgcacgatgatgacggtgattaatctggcgctttcgggttttctggtcaaatagctcaggctgagcccgaagctgacggccaaaagaatttcagaaacgagaatcaacagcacaagtcccatgtggctgccccagttcgctttcaagataaatttgctgaaggcgacaacggcaagaatcgtcagaacattcacagccaaaatgccgagcatctttccaagaaagatatcgcttttccggagcggggcggcgatcaggcgatccgcggtgtgccgtattctttccccgcggaataaggagcttgcaaaaatcgaggcgtacagcccgatcatcgtcgtcatggatatcgcgtaaaaatctttcgccttcggttcttttgctttgtgtaaagacgtctgcttcatataatcgcttttgatttgtccggcggaaggtggcttatgcgccttgtaagcggcggcgcctgctttgtattgattggtaaaagcggtcagcatgccttggacgatcgtgccgttgatgccgctccggtcatttgtatagacttgaaaaccggtgttttttacagtgacgaaagcatccgcctgattttcacgaacctcgtttttgccttttgcctccgtgtccgctttttgaaaatagacatgctcttttttggcgtttttcataaactcagtaaagtaatgagaaagtgtcccgtttgattggtccgtatatacgaccttgatgttcccgaccgtcacctctgaatcaaaggcgtttgataatgccgcggtaaaaatcagcatgaagacgatcggaaaagcaagcatgaaaataaaagtccgtctgtcgcggaaactgattttgatttctttcccggcgatgtgcagaatattcatttgcaatcctcctttcaatagggtcagtcgcgcagacttctgcctgtcagcgtgagaaataccgtttctaagtcaggtgcctgttcctgcaaggagcggatttcaatgcctttgtccatgaagtaccggatcaggcggtttaaattgttgacccctgtgtcagagctgattttcacgctgttttcttccagtgcggcggctctgacgccgggcagctcctgaatatcgccgaggctgatgccgtttccggatgacagctcaatcacgacgtccttcgtgtcggtaatgatggaggtcagctgttcttttgtgccttcggcgatgacttttccgtggtcgatgatggcgatgcgtgtgcatatttcttccacttcctccatgtagtggctcgtgtaaatgatcgtgcagcccatttcattgagctttttcactgattgcagaatataatttcttgattgcggatcaatgccgaccgtcggttcatccatgatgatcagtttcggccggtgggcaagggcgcaggcgatattaagccggcgtttcattcccccggaaaaatgcttcggcaaatatttgtgtttatcgctcaagccgacgaatgtcagggcttcctcgacccgttctttcagagccgcccctctcaggccgtacagacctgcgaagaacttcacattttcataggcgtttaattcctcgtaaatcgcgaggtcctgagggacgatgccgatattcattttcgttgctttgctatatttgaaaatatcttttccgagaaacagaatgtctccgcctgaaggttttaaaagacctgagatcatattgatcgtcgtgctttttccggctccgtttgcgccgagaaacccgaaaatctcaccttcttttacggcaagcgacatctggtcaacggcggcataatcaccgaatttcttactcagctgtttgagctccaaaatgttcatgtttccacctctatgtcttatgatgctcttattataaaaaaaagaatgaacggccgttagtgcagctgttcattcctttgacatgagaatcttcatatttttcacatgaaaacattcacttattcaaccggaagcaatgtcgtgacggaaaaaccggccgtgccgtcaaaaataacggttccgtgcaggacggccgcccgttcttccataccgagcatgccgaggccttttttaaagcggacggcgccgtttccgttatctttcacttccgctttcacggctttattcagcacatggatatcaatgaaaatctgcgtggcatcggcgtatttcatcgcattggttaaagcttcggttacgttttcctgaatgactctccaatgcatttgcgtcagcctgtccaaatcgccttgatgcgtaaacggaaccggcatcccgtttttggccgaaaattcatcaataaacgttcttaatctgtgaatgcccatttgttcagcgggcggtttcatatttttcagcgttatgcggatatcctctatgccctctttggaaatggtaatggcgttttggagcagttcagccgctttgtccggatgggagccgagcatccgcttcgccgcttccatctgaatgagcgcgccggtcatcgaatggccgattttgtcatggatggcttgggacaatctgtttctttcctcgagtttgccggtgtactccgattgtttgatatattctgtgctgctgtgcagctgtttcgtcagtttttcaatgcttgagcgcatgctgtccgactgttcttcatatttcttcagccgattgccggaccgggcggccaaaacgaaaatcgccagacagaacaaggttatgacgatataagtcggaaggtcgccgtacgggataaataaaaacggcaaaaacacgagcaggcagaacacatagcggtgaaccggatattcggcaagaaccgcaaaaatggcgggcggcaaaagaaacagaaacgccggatggcctaaggcggaaagccaagcggtcaatgccagcgtcatgagggtgatcccgcgcctccaagcgggcggcctgatcatgcagaccgcgatgcccaaagacagataaagcagcagaaataagacggcgtacggcgtgtaagggcggtctaccgatacgaacaaaaaagccgtataaaaaatagcgatcagtctgctcatcagcatccaaaaatccataccgttcaacgcccgttatccaccttcccggtgatataaaaaatggcgatctgcgttctgtgctcaagccccgttttccctaaaatagatgaaatataattggccgtcgtcccttcagaaatgaaaagctgttttgaaatttccctgttcgagaatcctttcgcaataagcgacatgatgctgagctctctttcagtaaactggctttcatcaatctgatgcgcggcttccgccggccggaaaaggctgtcttttattttgtccagcacggtgtcctgaagaatgctgtgcccgttgaaaacgcttttgatcgcatcgcggatccgttccggttcggtgttttttaataaatatcctttcgcgccgtttttaattgcttctaaaatatactcatcgtcgtcaaatgtcgtcaggatcatcggcttcgtatccgtttcctcagcgatccgttttgcggcttcgacgccgttcatcaccggcatgcggacgtccagcaaggcgatatcgacggggttgtgcttacaatactctgccgcctcgagtccgttttccaacgttgctgatacagtaaattcctcatatgtatgcaaaatgattttcattccttctctgatgaaagaattatcatccgcgataatgacattaatcttcatagccgcaccctttgtgtgtttttgtttcattatataccatccgattttaaatcaaaaagcctcccggcgaaaggtgcgcggaaggcagatcggtcaagcgggctttttcaattggatgaaaaacagcatcagaaaagaaatgatcacaatacagatcacccacacccaggcgagtgtttcattgccggagtccatcgcgacgtaaatcgccgtcggcagcgtttgggtgacgccgggaatatttcccgcaaacattaaagtcgccccgaattcacctagcgcccttgcaatactgagaatgcttccggtcaagagggagggaaaggcaagcgggacggaaatacgggtgaacacctgccacctgccggctccgtctactttcgccgctccctcgatgtcagcatcaaccgcggcgaagccggttttagcggactgatacataagcgggaaggcgacaatggccgaagcgatcaccgcggccgaccacgtgaaaatgacgggctggtgaaaaatccgctcaatcgcccggccgataaagctgtgtttcccgaaaatgataatgagaatgaagccgacaacggtaggcggaagaacgagcgggagcataaacagggtctccacagccgtttttccgggaaatcgcgctttcgccatccaggcgccggcaagcgttccgagaatgatgacggcgatgcccgacgccaaagccacctcaaatgacagtacgacgggagtgaaaaactccgaagccgtaatgttacttggcagtaaatccatatttcttaaacactttcatcgcttcatctgactgcagatactgataaaacgcttctgcttctttacggtgctttgtatccttgacgatgccgacaggatacacgatcggatcgtgcgttttcgccggtgcttcatcggtgattttcacctttttcgaaatcagcgcgtctgttttatagacaagcccggcatcgacatttccggtttcaacataagaaagcacctggcggacgtcttttgcatagacggctttatcttttaccttgtcccacagggataatgccgtcagtgactgtttggcgtattgtccggccggaacggattcaggcgtgccgagcgcgattttttccgtgctgtcttttttcaggtcattcagatgtgtcaggtgtgcgctgtttttctcaggcacgatcatgacgagatcatttttcaaaagatccgtgctgtcctttttgtcgatatctccgtcatgaacgagcttttcgaatttatcttcggctgccgagaagaataaatcagctcccgcgccttgtgaaatttgtttttgcaatgtgcctgatgatccgaagttgtcttgaatggttacgtttgaatgtgatttttcgtagttggtctggatttcttcaagtgcatcctgagcgctggctgctgcagaaacggtcagcgtgacgttttcgttttgtccgcctttggacgattgtccggatgagcagcccgcagttgcgaggaaaacggccatagccgcagttgtgagtagtgtcgctttctttttcaacattgtgcaccccttatagctaaatatcattagatcaaactaattataacgcaattgtacgtgatggtgcggttttttttcaatatctgaacagttataataaaaacggagcgtgataatatgacagaagccacttcctatacaatagaagaagttgcgggccttttgaaggtctccaaactgacagtatatgatttgataaaaaaaggactcattccggcgtacagggtcggaagacagatgagggtcgatgaagaggacttaaaacaatataaagcaaacatgagaatgtcaaaaaagccatccgcagcagaagcgcctgacccgtcacgcgggcgggagccggaaaaaaggcagtctgttatcatcagcgggcaggatgtgtcgatggacctcctcagcaaacagctggaacaaacaatacaggcggctccgctccgcaagtacagcggcagtttgaacagcctgatcgagatgtaccgcggggcttgtgacatcgtcagtctgcatttatacgatggggagacggggcagtataacatcccgtatgtgaagcgcattctttcaggggagccgtttgcgctttttcatgtcgtgctgcggcaggccggattatatgtgaaaaagggcaatccgctgaacattcagggctttcaggacatgagccgaaaggatgtccgcatcgtcaatcgcgaaaaaggatcaggcgcgagggtgctgctggatgaacagctcagatcattcggcatcacgccgtctgatgtcgccggatatcatgacattgtcacggatcatctgtcagcggcttcacaagtatcaagcggaaaggcggatatcggagtcgggtcgctgcatgcggcgcatatggcaggcacggactttatcccggtgatcagtgagcagtacgatgtggtcgtcttaaaacaaaaccgggagcttgttcaaagcgtgcgggacattcttaattctgaggaattcaagtctcagctttctcaattatccggatatgatacgaaaatgacaggacggctcatatatgaaacatgaaaaatccctccatataacggagggatttttttattgcttataaaaccgcagcaggtcgccgtttaatattttatcggaaagcatcagctcttgttccgctttttctttctcatcgctgcacgcgctcatgtcagaaagcggttcacccgttttacggctgtaacacgtatttttcgtataaatatggtcatccgtgataaagctgccgtttctcagcaccgcaaacggagtccgctctccggaaaacagatcattgccgaactgaatgctgcctttcgtttcaatgccgagcaggtgaagcagcgtcggccttacatcaacctgtcccgcggccgaagcaatcgtttccggcgcacggtcggtcaccccgggaatatgaatgataaacggcacgcgctgaagctgaaccgtatcaaacggagtgatttcctctttccctaagaattcggcaagtccttgattatgggcttcggatataccgtaatgatctcccatcaggacgatcatcgcgttgtcatacagcccttcttttttcagcttcttgaaaaagtgtttcagagcctcatcttcatagcggaccgtcgtcacatagcggtttaataactcgctgcttgtgtccggttcctcaatgagctgatcctgttgatcaatttcaaaagggaaatggttggtcaaagtcagcaggcttgcgtaaaacggctgcggaagcttctttaatttttccgctgactgttcgagaaactccttatccttcaggccccagcctgttgaattttcctgtgtcaccttaaattcatccgcgtcgaaaaaacggtcgattccgaatgccccgtacatctcatcccggttccaaaaggctttatgattggcatgcagaacggctgaatagtattgacggtcttttaacatatggtacatcgtattgaaccggtggccgctttttgtgaaaaaaacggcgccgcttgaagacggatacagcgaattcgcagtaatgaattctgaatctgatgtttttccctgttcagtctgctgataaaaatgagtgaagtcataacttttttttcgcagtttgtttaaaaacggggtaatctcccgtccgctgacccgctcatccattacaaaacgctgtgttgattcgagcgtaacaaagatcacattgcgcccctttgcaagcccgaattttgaatcggacggcctgctgtagccggcttgagtgtaattcgcgaccgccgcaaggctgtcttcatcggcaaacgctttagcccctgcattcagcgtctgcgaaatggtgtcatacaaatgaaagtggaacaggccgattccttttacgagcgcttcacgatcaaaagggtgcttgaacagcttcggctgctcggcctcagacagcgcaaggttgcacagcatgaggccggctgatgcccacgcatacgctttaacggtacgggcgcccgcttttcctttatcggctttatgcctttttccaagataaaacaaaatcgcaatatccaaaaataaagcgatataaagcgggtgaaacagctcttggacgctgcttcccatatcacccatattgcttgcctgaaacaaaaccggtatggtgataaaatcaatataaaacccgtaaaacaccgtattcgcgattaaaattcccgtcagcatcacatttgccgaaagcagaaagatccgctgttttttttccgtcagcaagagggcgatgccgaacagcggcacaatgaagctcagcggattaataaggagcagacattcctcaagaaccgaattgttctgcagaccgaaaccgagcttatacacggcataggttttcatccacatgaacaggatggacaggcataaaaaccgatgattgctgaaaaaggttttcttcatatgtatgactcctcaccctaaaagcgaaaagacgctttttgtttaagagatgcggccgtgaaccagttcgtataaataatagcaggatacaatcgttaagccggccagcacaagctgctccgaaaagctccccgttctcatataaaggggaagacggaagcggatggcggacggaaacagcagtttaatgccgttgacggtccatgcgtcaagtacaagatggcttgccattccgatcatcagtccggcggaaatgctcggattcggaatataggttgccgtaatgaaaaacataataagcataaacagcaggctgtgtgtaaacgttctgtgcccgaacaccgtgcttacgactttggacagaacgggcagcgtcctgccgattttgcttttcgtatggcatatgtcgggaatcagcgccccgagggcacccgctgaggtcataaggaccggatcatacccgtaataatacgcaattgcggaacaagaagcgatgcctcccatgatgtgtgtttttcctgtcatttttcgcttctcctttttatttttgccaaaatcccctgaattacaaatatatcaagagaatgcatgtttgatcaacaaactttacctgttccgccaaaaggaaggagacgcggattccgcatattctgccgcggaaaaagacacattataggtgtacctatatttgataaagaggtgatacagatggctttctttaacaaagaaaaaggaaaaaacagcgataaaaacaaaaacgtcattcaaggcgcgcttgacgacgccagtgcagctctgaaagacgatccgcttcaagaagctgttcaaaagaaaaaaaacaaccgctgaccatataagacgggtagggcgaacgctctatccgttttccatctaatatttccctttgacagatctttttatctctgataacctctgagtagaattgaatgataaaaatcctcactctttctcggtgaggtagaggttgcgcttgatgatgagtcgcacatgccaggctgataaggggccgcaaaacatgtgttaaaggcatcagcgccgaagtgtaaagaaagccgatccttctttatgctgggactgtatctgaataagtgcaggactgccgcgtgctttttcgcggagggctatccggagatcaagggtgtgtgtgtttctttaagcatggacttttgttcaggctttttttgcgtgtaaatatggtctcggggtctggtccgtacgaatgaacaaccaggaggtacaggaatggaacagacgaaaaaatggggtttttggttattaacggcgtttgtcgtaggaaatatggtaggctcgggcatcttttcgctcccgagtacgctcgcaaaaatcgcgagcccgttcggcgccacatcggcatggcttttaacgggagccggtgtgttaatgatcgcgctggtcttcggccacttatccatccgcaagcctgagctgacggcggggccgcaaagctatgcgcgtgcgctgttcagcgatcggaaaaaagggaatgctgcgggcttcacgatggtgtggggctactgggtggcgagctggatcagcaacgtggcgatcatcacgagccttgccggatatttaacatcatttttcccgattttaacggataagcgtgaaatgttttcgatcggcggtcaggcggttacgctcggccagctgctgacgtttgccgtatgtacggttttattatggggcactcacacgatcctcgtcaccagcattaacggtgcgagtaaattaaatttcgtcacgacgttttcaaaagtattaggatttatcttctttatcattgcaggtttgtttgtatttcaaacgtcgtttttcgatcatttttattttcctgttcaaacaggtcctcacacggttgagggaatcggcggacagatccacaatgcggcgatttcaacattatgggcgttcgtcggaattgaatcggcagtcattttatccgggcgcgcccgttcgcagcgcgacgtgaaacgcgccaccattaccggattattgatcgcgcttggcatctatatcatcgtgacattgattacgatgggcgtgcttccgcatggtaagcttgtcggctcggaaaaaccgtttgttgacgtattgtacgcgatcgtcggcagcgcgggaagcgtcatcatggcgattctggcaattttgtgtctgttcggaacgatgctcggctggattcttctcggttctgaagttccgtatcaagcggcgaaatcaggagactttcccgctgcttttgcaaaaacgaataaacagggaagcccggttgtgtcgttaatcgtaacgaacgtaatgtcacagatctttatcttttcggttatttcccggacgatcagtgacgcgtttacgtttttaacgacggcggcgacgctcgcttatctgattccgtatctcgtgtcagcgttttacagcctgaagctcatttttacgggtgaaacgtatgacgagataaagggttcaagagtaagagacggtatcatcgccatccttgcctgcatttattctttttacgtcattattaccggaacggccgatttaacgacctttattctcggtatcgggctgtttttcgtcggtttgctgttatatcctttcgtctcaaagaaatttgcaaacaacagaccatcggtatgacaaaaagacatctcacgtctgtgagatgtctttttttgtttgcaacagcggattactttttgacggcgtgtatataatgaatggtctcaaatgcggttaaatggtcagtgcgtccgctgaaaaaacggtcattgacgtccgccggagatacatgttcataaataagcagacctgatgattctaatattttttcgatttctttataactgaaacacgataacatcggttctccgcctgctgcagccattttcaccatgttttccactctgtttgacagtcctctttcttcaaagagcgactcatctgcataatcaaacacgatagagcttcccggcgggacttcggcaaataattgtgtgagcaggcgggcgagatgctctttcgtaaggtagtatgacacaccgagcaggctgaaaaaggttttttggcgtgaaaaaccttcctgatacagacggctgaaagaaagcgaagcggcgaagtccatcggtacaaaatgaagatgatgggaaatgtcgagattcagatgtttcaatctgtttattttgtcttcctgtgaagcgggatgatcaatttcaaatatgtctaagacgtttgtcatctcaggatgcctgaaacagaaagtatcgagccccgcgccaaggataacatactgtttggccccgagcttcacttcattcaaaagcacttcttcacaatatgcggcacgggctaacggtgtaggagacagctgtacttgagtcacccattttaagatgtcatccggttggccttgaagcctctgtgccatgtctttactgaaaaatgatataccttgaatcagatgatcgcggatgtccgaatgctctttttcggaaatcagatcttgtgccataaaatcatcaaatatcaccggggtgtcgtatttactgtggtacgcccttccgaaagcggacagcagggaagtcatactcgccttgttttctttcatataaagatcctccgttatttacatcaatctccggccgggagaatcttattatacatgttaatccaaaaatgtaaattataacataaataaatttttttgtcaagttttaagcgtaataaaaagccgctgtgacagcggcttcggggttacttcgttaagctttttgtgatgtagtcgagctggccttcaagtgagatcgggtctgagaaatagaagccgatcggatcaatgcggtagacatggttttgtttgacggcatcgaggttcttccagattgagctgtcaagcacgcctttgtcgtcaccgccggcctgccatggccccataaagatgtagtctcccgcgaagtcaggcagtttctcgagtgaaatgctggcgtagcccggcccttgattaatggctttttcctgcgtcagttttgtggccttcagcccgagtttgtcataaatgatgcttccgccgcggccgaagtctttaccgaatacatagatgtcttttccgtttgtctgcatgatggagatggtttttgagccgaccgctttttgaacctttgttttagcggcagcggttttcttatcccattcagccagccatttgtctgctttatcttcagtgcctgtcattttcgcaaactctttgaattgatcaatgttgctgagcttgtcatatttaatggcgatggtcggcgcgattttttccagtttttcaatatcggcgccttgtgtcgtccagacaacgattaaatccggctttaagtcaatgattttttcaacggacgtgccgtcgccgatgtttgtgacaccttttgttttccctttgtaataagggtttttaaatacgttttgcggcgcgccgacaacattgatgccgagctgtttaaagtcgccgtagtagccgtcagccatgacgacgacccgtttcgggtgcttcggaattttaatattgccgttttcggctttatacgtgatggtttcttctttttcagaagaaccttttgtgtctgaagaattgccgcatgcggccaaagcggcgaagagcagcacggcaatcagcgctgcgccgattttcttgtatgtatggaacatctgacattccttctttcataaaaattagtgataaagagaatcattatcagtgtgattatatcactgctttcatagagaagcacgctctttttaaagaaaaactttctttttttatatgaaattaggtctattaaaagagaagataaaagtgctatactgaaacaagtcattgataatcattatcattaccattcttgttttgagaaaggaagaacgagtgttgggtctattgaaaaagaaacagacaatgacggctcaaggggcatcagggagtgaaatccagtggacggcgcgttcattccgggctgctgtgctgctgtgtgccggtattgcggttttattgatcggcgccgctctgtctgtttccatcggagctgccgatattcatctgcggacggtgtgggatgctctctttcactttcagccgcaaaatacatctcatcaaatcatacgcgatctgaggctgccgagaaccgccgccgccgcgctcgtcggggcttttttagctgtgtccggagcgattatgcaggggctgacgcggaacccgcttgctgagccttccattatgggcgtgacgtcggggtcaggatttgcgatcgcattggcatttgctttttttccgggtctgtctgcggcgggacttgttttgtggtcctttacgggagcgggaatcggagcgcttattgtgtttggcatcggcctgtcttcaaaaggcggtctgacaccggtgaagctcgcgctggccggtacggcagtcggctatttcttaacggggctttcaagcgcgattgcgatccgttttgatgtcgcccaggatgtgaagttctggtatgccggaggagtcgcttccgtcaaatgggaaggcatgcagctgcttttggcggtcggggttatcggactattgctggcatttctgattgcgcgctcagtgacggtgctgagcttgggtgaggaactggccaaagggctcgggcagtacacatcgcttgtgaaagtaatcggaatgtttgtcgttgtcctcttgacgggggcttcagtctcagtcgccggagccatttcttttatcggcttggtgattccgcatatcacccgatttttagtcggggtagattacaggtggatcattccctgttcggcggtattcggcgccgttctgttagtcttcagtgatattgccgcaagactcgtcaatgcgccgtttgaaacaccggtcggcgctttaaccgcccttatcggcgttccctttttcttttatttggcgcgcagggaaaggagagggctgtaatgaatgtaaaatcgaaaaaaccgctggcggtcatggccgttacgtttgtgctcatatgcatcgtcttttttatcagcttaaacatgggtgtgatccggattgcgccacttgatacgatgcgtgtctttttcggacagggggatgcccgggatcagctcgttttatttgaattcagactgccgcgcatggtgctgtcattgcttgtcggcgcaggaatcgcggtttcaggcgcgatttttcaaagcgtgtctcaaaatgacttggcggagccgggcattctcggtattaacgccggggcgtctttggcggtcgttctgtttatcttctttttccaagggtcagctgttgatctaagcatggccagtacatggctgcttccggtgagcgctttggcgggggcttttctggctgcgctgctcatctatgtgctggcttggaaaaaaggcgtttcacctgtccggctcgttttggtcgggatcggtgtcaatgcggggtttaatgcgcttctcttgatttttcagctgaaaatggacccgcgggatttcatgcaggcgcttgtatggatttccggttcgatttggaacgccaattggaaaatggtgctgtccattttgccgtggctgctggttcttttaccgttcagcctctataaagccaggtatttaaatgtgctccagctcggtgatcagctggcggcggggcttggcaccaaggttgaaaaggagcggcgcgttctgctgatgtccgccgttgccctgaccgcgtcatgtgttgcggcagccggcggaatcgcttttctcggactcattgcgccgcatttggccagaaggcttaccgggccgcgccaccagacgcttatcccggtttcagctttgatcggagcatttttatttctgcttgccgatacgctggcgagaaatgtgcttgcaccgtccgaagttcccgtcggcctggtgatttccgtgctcggagcgccgtattttgtatatttgctgatgaaaacgaaatagaggaaggagactgccgcgatgaactcattatcggcggaacagcttactgtcggttatggcgaccgtttgatagcgaaagaattggatatcgccatcccgaaaggaaaaattacaacgctgatcggtccgaacggctgcggaaaatcgacggttctcaaaacgatgtcaagaatcatgaaaccgaaatccggcgccgtctatttaaacggacaggcgatcatgcaaaaatccacgaaggacatcgccaaggaaatggcaattcttccgcagacgcctgaagcgccgagcgggctgacggtgtacgaacttgtttcttacggcaggtttccgcatcagtccggaatgggccgcttgagtgataaagaccgtgacatgatcaaatgggcgcttgaagagacggggatggccgaattttacgaccggccgatcgaagcgctttccggggggcagcggcagcgtgtgtggatcgccatggcgctcgctcaagaaacggagctgctgcttcttgatgaaccgaccacttatttagatctcgcccatcagcttgaaattttgcagctgctggacaaattaaacaaggagcagggccgcaccattttaatggtcattcatgatctgaaccatgccgcccgtttttcccattacatgatcgcgctgaaaaaagggcgcgtcatcaaggaaggaacggcggaggaagtcatgactcccggtatattggaagacgtgtttcaaattgacgcacagattgtaaaagatccgcgcacgaacaaaccggtctgcttaacctacgatttaatccggcatgaaaacgcaactgtaagatgaaaaaaaacgcagagccattccggcctgcgtttttttagtgcgcccggggctgcttttgtccggagacgcatttatccaaaacgaaaaaaacccccgccacaatcagctcctccgtcgttgacagccaaatcttttcaatcagtttatccgtcgtatacgcagtcatccagaggaacagcagctgaacggtgccggctaaaaggagaaaaggcagcctgcccgtcccaaaaaaggtaaagctatgtatcatcagccgttcaagcggttcaaaacataaaccgagaagaataaaaagcacggaaaaaagcaggacgtacgccatcgatccgtagctcgtcccggctaatgaaaatacggccatcatcacgatgaaatacccgaataatacggcagcggctgccagggcataccggagcacctgaagaaaaaacattttcgtcccgttttgattgatcatctgttcagctccttttcacacagaggagacttgcagagacggaactctgcaagtcgggtgtgtatcttcagcatttctttttgacgacagggtgtttctctttcgaaagaatatccgtaaagtctttgcccagatccagatgctgctggacgaatttctcaggaagcatggcaagccattggttcagggacacatcggcatagtggtcatccttgaagatttccaggaagacgagcggctcatcccccaaattctccacatagtggcccattgcgaacgggacgtaaccgacatccccggcctgatagttaaatgttcttgcatggccgtccgatgcaaaaaccgtcatccgtcctttaccggaaatataatactgccattcatgcgtattcggatgccagtgcagctctctcattgcgcccggttcgaccacgacaagcgctgaagcgatcgttttggacactttgaagtttgtggaatccgcgatatatactttgccgccttccgtctcagcagtcggaccttcatcgagcaggcggtaagtgaacggataaggcacttcgccgttcgggccttccacaatgtcgtctttcagcttcccgggaaccggctcttcaaagatgtatttttctttccgaggcaggccggcgaggtctttttctgaaaccccgaaattgttggcgatgacatcaagcggcgtgtgggcaagccagtcagtcacttggaatgtgctgttttctgagaaggaaccgtcatcaaaaaccaagaggaattcacagccttctttcagcgcctgaatggagtgcggcaggcctgacgggaagtaccacagatctccttccttcacgtcatcgataaaactgcgtccctgttcatcaacgatcgtgacccgcgctttgcccgtcagcatatatgcccattcggcttctttatgccagtgcagttcacggatggcgcccggttttaaacgcatgttgacagatgccagattttcagaaatcggcagctcgcgaacggtcacctcacgcgcgtacccgcccttttccagccggttatgcacatctgagaaagagaatttcatattatccactgtgccgtgatccgtttccggcggcgtcagcatatccggattttggcggtctctttcaagattgcgcggaatcgtgacggtcgctcctttgtctcctctgatcggctgcgggatattgcagttgttttcttttgacatgtaaatcgtctcctctcaagctttgttttttcagaaagagaatgtgaaaggcctttcgttttcccttctgctttgttaagtgatgcgttccgatgaaaagtcaacttcgtgtgaaaattaatttttcattttctgatctttcagttccgtcatcagttcgatcagggcgtcaaacttcttctcaaaccgtgtgagaagatacatagcaatcagagccggaaagccgagattgccgatctgtctgaccgcttcttctataaaaacctgatccattgtcagccacctcctgacttgacctgcagtcatgtatataagtgaaagaaagagcggctcctgtaaacctgatatcccggttgagggtctttttttttgttccggcaaatccgggacataaggaatgcggaatcttagtcggaaaggagtagtttacttttttttgctttctttcatttaatttaaatagggggcggttttatggactatcaagttcttttacggtcaaaatgcaaggaaattatgaaacatccgatcgttaaacattttttaagtgacccaaagcattacgagaaatttaaaaatgtgctggaacattcagacgagaaggatgcaaaatcattggacgaccattttaaacagttttataaggaaatccggatcatcaaatatatgaactctatgatccggattttctccatcgattttgacaagcgcatccgtaaaaatcagaatcgctatccgctgacggtggatcagccggagggaggtgaagcgcttccctatgaaatgggaaaagacgcgtatgaagagtttctgcggaagcagggagatttgagccagcatgtccaaaaccgtgatttatacgaagcgcttcagacgttaaccgataaacaaaaaagcgtgctgacgaatatttatcttcacggagcgacgatgaaagagattgccgagtcgctgggtgaatcacggcagaacatttccaatattcataaaaaagggctcgacaatctcagaaagcagctggacaagcaaaaaaagggggaaaataagcagtgaacgggccatttgacttcaacaaagagaacacagataccgacgaaatggaacttttgatttcacgtttttcgccaatgataaaaaaaaaactgagcaatacatcataccaggaaagagaagaccttgaacaagaattgaagattaaaatagttgaaaaagcggacatgctgttatgccaggaagtgccgggtttttgggaatttattcttcatcttataaatgaaagctcctgacaaaagcggcggaatgatggatattccgctctgacaacgtgagaaaaacgagaagagatgtccgtctcgtttttcttttctgtttccccgcaagacctccgcactaaaaaggtaccaaatcttatccatataatgatatgatgaaaaaaacaaagagaaaggaacgtccaaggtggaaaatgcgtcaattttaattgtagacgatgagaaggcgatcgttgatatggtcaaacgcgttctcgtcaaagaaggctatcacaacattaagacagccggaagcgctgaggaagcgattgagtttgttaaacatgaaaccgcggatctgctcgtgctggatgtgatgatggaaggcatgtccggttttgaagcatgcaccgaaatccggaattataccgacgctccgatcttttttctgactgcccgttcttctgatgcggataagctgtcaggatttgcattgggagctgacgattatataacaaagccgtttaatccgctcgaattggcggcgcggatcagagcgacgttaaaaagaacctataagcgcgaagagaaaacggcggtaaaaacgtattcatacagccatttttcctattcgccgcaaaacgccgagctgatcgtcgggggcgagcccgtcagctgctccgcacagcttctgcaattgcttcaatatttctgtgaacaccctgatgtggtgctctcaaaagatcagatctatgaaaaagtgtggggatatccgtcttacggcgataacaacaccgtcatggtgcatatccgcaagctcagagaaaagattgaaaaagaccccagcaatccgtcttatattgtaacggtgcgcggcctcggctatcggtttattcccgatcaaggagaaaaaggaatccgctcatgagaatgcgcggaaaatttctgctccactttttcggacagcttctgcttgtcatcctgctgatgtccgttttggccgtcgcttctttcttctatttggattggcgtttcagcgaagcggaagccaatgcgggactgaccaaagcgacggcagactcgtttgaagcgtggcttgataaaaacgaagacggcacatgggatgtcgatgaatttttaaagatgtcggtcagaaagcagaagggctggctgcagatcattaatgacaaagaaaaaacggactacgcatacagagtgccgaaagacgtcccgagccattacagcagaaaagacctcttatccatttaccagtaccggaattttgacaactacaagctgaattactggacggtcacgataaatgatgagacctatttgattctgttcggctggaaatccgccagtgagcagcttctcacttacatcgaatcacaggagccatccctcgcttccctttctcaatataaaaaaagcacggttgattatattaaacgggaaaaaggggcggtctaccttctcgaaaacagcggcagactgctcggggatatcaacagcacgaaaaaagaacggaacaccgtcaatgagcttgaattgctgaaatacagttccaagccgtggaattacaaacgggaaatttcttttaaaagactcgataaaacgaaatggatggtcgcgtcggtgccgaaccccgtgtacatccccgatcacgagtttaacaaatcatttttgagaaatgtgatgaaaaccctcttcctcttgatcggaatcttagtatttatgatctgcatcctgaccatctggtactctttccgtttcggctggccgctgtttcataccatcaaatggcttgtcaatttatcaaagggccggcttgaagagccgaagaaccgcaaaggacagccggtcagcaaaaacaaaaaaggcaaaacaaaacagccgttccgctttttcgccgagattttcgaatcgatggatcagctgaccgacacgctgaagcgggataagaaaaacagagaaaaaatccaggcgacaagggaagaatggatcgccgggctgagccatgacttaaaaaccccgctgagcacgatttacggctacagcatgatgcttgaatcgaagcaatacgactggacaccggaagaagtcaaagaaatggggcagatcgtccgggaaaaatcagaatatatgtctaagctgattgaggacttaaacttaacataccgcctcaaaaacgcggccctcccgatcgaacggcggctgatcaacgtcgtgccgtttatcagaaacgtcacgaacgattttacgaaaaacacgttctcggaaggctatgacatcgcctttgaaaccaaaaaggaagacattcttttcgccattgatgaagcgtggttccgccgtattctggagaatctgctggcaaacgcggttaagcataataagaaggggaccgccattcgggtggtgcttgaggaatcagccgaacagctcattctgaaggtgaaagataacggaagaggaatggacgatgaaacgattcaccagctgtttaaccgttattaccggggaacgaatacgaaggggccgtcagaaggaacgggactcgggctcgccattgccaaagagctggttcaccttcataacggaaccatccatgtcaacagcagaatcagcgccggaacggtgattacgattctttttaaaaaagattgagtttggacgccgctttgtcgggaataacaatagaagactgacaagcaaaagaggtgttcacacatggaagcagcattacgagcagatacgagagcagttatcggagaaggccctttatgggacaaggataaggaatgcctgtactgggtggatatactgggcagccagctccatatcttcactccggctgacggaatcaaccgttccgttaaattcaactcatttgtcacggctctggccttgtattcaaaggaagagctggtgatgacgatgaaagacgggttttacctgtacaatctgcgggaagacacattgacgaagatgaagcagccgaaagacatgcgggaagatatccgtttcaatgacgcaaaatgcgacccgtccggcagattatgggcgggaacgacgagcatggaaggcaaagaagaggaggcttcgctgtaccgtctgaatacggacggcagccttgccaaaataaaagaccaggtctccacctcgaacggtttggattgggatcgggaccgaaacctgatgtactatattgatactccgacgcaggaaatcgtctgttatgcatatgatcctgaaaccggagccgtatcagatccgaaaacggtctaccgctttccggagtcgcaaggatctcccgacggaatgaccattgaccgtgacggaatgctgtgggtggctctgttcggaggcggccgcgccgtccggattgacccgtttttgcataaggaaattgcatctatcgaagttccggcgaaatacgtcacctgctgcgcgttcggaggcagcaatttgaacacgttatacattacgaccgcgacggaaaaattgacggaagccgaaagacttgagcagccgcatgcgggcggcctgttttcagcagagcttgagacgggcggctgggagccggttccgtttgcaggcatgatgtaaaaaaaagccctggcatatggggaagttccccttgtgccgggcttttttgtgttaaatggagcggatgatgccgccttcaacccgctgtgcggtgccgttaatggcagaagcagctgatgaagcgagaaatacaatcgtattggcgacttcttccggggttgcatagcgctgaatcaaagatgtcggttcattcactttaaaataatcccggacgaagctgtccgtgtcttctccggcagcctttgcggctccttccatgtaagaagcgacgccttcggtccatgtcggtcccggcagcacggagttgaccgtgacattcgtgcctttcgtcatttccgccattccccgggacaagctgattaacgccgttttcgtcattgaatacggaatcatttgcgcaagcggtttgactccggcttcactggagatgttcaaaatccgtccgctgtttctttcaagcatttgcggcagaaaacgccggcacaggcgcacggcgctcataacattcacttcaaaataccgagtccattcgtcatcagacacctcagcgaagtcctttacttcaaaaaaaccgagattattgacgagaatatcgacttccccgattccgccggcgcgcttgatcaggtcatccgcctcatcctgacgcgataaatccgcagcgatgccgtgaaccgttccgtaagcggaaagctcctcaaccgtccgttccacggtttctttttttcttccgtttacaatcacctcggcgccttcggctaaaaagctttttgccgcggcttttccgatccctgaagttgatcctgtaatcaatacgagctttcgttcaagctgtaattccatgataatcctccttattacaccattgtgtaacagtatacatgatgaattttagtgtgtacgaacaatttgctttcatgcaaaaaggccggatatacaagccttaaagacttatagtataattactgcgaaaaaaggatacgaatgtcaaagagacaatcgtttaccataatcagggggagttaaaagaatgaagaagatcactgccgtctgggcggcgctcttggtcaccgcctttgtgatcgccggctgttccggcgcacaggaagaaggaagcgcggccaaacaaaaagccgtctcaaccgaagcattcccggtaaccattaaggatgccgcgaacgaaaaagtaaccataaagcaggcaccggaaaaaatcgtttccctcatgccgagcaatacggaaattacatacgcgctcggactgggagataaggtcgcaggcgtcacgacaaatgatacatatccgaaagaagccgtaaaaaaaccgaaagtcggagatatgaatgtgaacgctgaaaaagtcatcgcgctgaagccggatctcgtgcttgcccacgcgtcctctatgtccgcttccgccgatgcgatgaagcagctgaaagatgcgggcatcaccgtcttaacggtcaatgatgcgcaatcgttccaagatgtgtacaaatcaatcagcatgatcggaaaagcggccggcaaagaaaagcaggcggatcagctgatccaatcgatgaaatccgacctttccggcatagaaaagaaagcggcggccatttctgaaaaagacgaaaagaaagtattcgtcgaagtgtctcctgacggctacacgacggggaaagacacgtttatgaacgaaatgcttgaagatatacatgcgaaaaacgccgccggcagccagaccggctgggtgcagctgacggatgaagcgattgtcaaaatgaatccggacgttatcatcacgacagacggcgtaaaggccgctgaagtggaaaaacgcgccggctggggtgccgtcaatgcggtcaaacaccacaatgtctattctgttgatcctgaccttgtcacacgctcaggcccgcgccttgtcaaaggggtcgagaagcttgcagaaagcgtttatcctgaaacgtttaaaaagtaaccgcccgctggcctacacggtcagcctgctgtttttagccgtttgtacggcactcggcatttcaatcggcagtctgcatattcctttatccgacgttttttggatcgggatcggccggacatcctctgttgatcccatgaatgtaaatattatgatcaatatccgcctgccgagagtcgttctggccgctcttgtcggagccgcgctatccattgcgggggcggcgtttcagggacttctgaaaaatccgctcgccgacccttatacactcggggtatcttcgggagcctcggcgggagccgttatcaccttgtttttcggcattcagattcccgtcatcggccggttcacacttccggttgtcagcatcgccgctgccattgcggttatggcggcggttctgtttttcagccgcctcgttcatgcgtcgatgtcggtttcgacgctcattttgacaggcatcattatgaattcttttctcggggctctcatttcgcttgtgattgctttaacgggaaatgatctgctcccgattgtccgctggctgttgggaagcgtgtcaatgaggggctggggctatgtcgcgctgtttctgcctttttttctggccgggacggcgcttctgcttatcaatggcagagaattaaacattatgacttatggagaagaaaaggcaaagctgttaggcgtcagtacgggaaaaagaaaactgctgatgatcgccgccggatctctgttgacgggaggagcggttgccgtctcggggacgatcgggtttgtcggccttgtcattccccacgtgacacggcttttgtgggggacggatcatcgccatttactgccgctgtcagcattgacgggcgccgggtttctcattttggcggatttgttttcccgcaccgttattgagcctgtcgaattgccgatcggcattatgacggctttggcgggagcgcctgtgtttgccttgattctgcttcgccagcatcatggagggaaacgcttatgatcagggtgagcagcctgtccggcgggtacggaggccggatgattgtagaagatgtcagttttaccgccggaaaaggtgaatttgtcggcatactcggtccgaacggctcgggaaaaacaacgctgatgaaattgctgacgggaatgctctctccgtcaaagggcgaggtgctcgtcgcaggcaggcccgcgggcagatacaagccgcgggagcttgcgaaaattatggccgttttgccgcagcatacggagcaagcttttacatttaccgttaaggaaacggtgtccttcggcagatacccgtatcaaaaaggactcttcagacagatggatcaacatgacgaagacattgtccgggaagcaatggaaatgacgggcatcgaccgatatgcacagcaatccgtccgcaatctgagcggaggggagcggcagcgcgtctatctggcgcaggcgctggctcagcagcctgaggtgctgtgtctggatgagccgacgacctttcttgatctcaaatatcaaaaagacctgcttgatacggtgaagcggctgacgagagaaagaggcctgacggtcatcagtatttttcacgacctcaacgtcgcaagccaatattgtgatcagctcctgatgatgaaagacggacgcgcttttccgaagcagccaccggatcaggctttgaaaaaagagacgattgaagacatttacggcattaccgtcagcgctgttgcccggcaatcgtcgccgaaaccgctgatcgctttcatgccggaagcgcgggaggaaagagagcccgccggcgttccgttcgcctctctgataaacaaaagcggaaataccgtaacgcttcatacagaacggccgtttagaatgctgtcaaccgcatctgacggcccgggcttttcgtggagccgccggctttccggctcggcggcagctggtttgatctgccgtacgtttgattcggttacgatagccgtgactgcgcagtataccgtttgggtgctgatcagcggacgtttatcggaacagggatttgttcggctgttaacggcagcggctgaagcgagaatgcaggctctttccggcagactggcaaaaggcgacattgccatttgtgccttgcagacaggagaggcaatggacgtccctcacgcggaaagagccgtcagaagaggaaccgcggtatgtgtaaaagcggcggaagaaggaggaatacaacaatgaagctttatacgaaaaccggcgataaaggacagacaagcctgatcggcggcagaacggataaagacagtctgcgggttgaaagctacgggacgatcgatgagctgaacagctttatcgggcttgcgcttgcggagctagataattgtgagaattgcggtgatgtgaaagccgaactccgaaacattcagcatgagctgtttgactgcggcggcgacttggcgacggtcactgaacatagaagctatacattaagagagacatctatttccgcattggaagactgcatagaccgttacacggctgaagcgcccccgcttgagaaatttattcttccgggcgggcataaggcggctgctcagcttcatatcgcgcggaccgtcacaagacgggctgagcgtctcgtcgtgaaactgggcaaaacagaagagataaacgatacggtgatgcgttacttgaaccgcctgtctgattattttttcgcggcggcaagagcagttaacgcaagacagggcgttcaggatatagagtatgaaagaagcgccgcggtattccgtgatgatgaataacgttttgttcagccggcagcagcaagccggctgtttttttatagagatatccatcaattgaacctttattgacagaaggaaaatgtatcttatgcattattgactgaaaaattaaaaaatgagatattataagaaacattgtaaaataatgggggatttgatagatggatacatataataagagcgagagcatctggaataaaaatttcacccttctgtttatctcgaggcttgttaaattgtcaggcgacggttttgcctttaattccattctgtggtttttgatttttgacggggaaggcgcgatcggcacgtccctgctcattgcggtcacgttccttccggaggcgatgctggcgccgattaccgggccttttatgaagcagcatacgctgaaattctggatgtatttctccgatctcacgcgcgcggcggtcgtgttgatcattccggtctgttactttaacggtttttctcctttatggtttgtcatgcttctcatgattttgcattcagccacgggagccgcttataatcctgcatctatctcattaatccccaatattgtcggagaaaacagcctgcagaaagcgaatgcggtcatccagtcatcaggccagatcgtcagacttgccgccattacgctgagcggggtgttcttaacatttatcagtcccgcttattctttgtttatcgctcttatattctatcttctatcaggttttctcgtactctttatgtcataccaagtccagcatgccaaagaggataccgtcgccgtcagacagcgcgggacgtatgtcggaaggctcaaacggggtttcgttcttgtcaggaaacaccagattttatacccgctcgccatctattgtatcttcatgaattttgcggccgctccgtgggaggcgctctctgccgtttatgtcgccgaagatttaaacatgccgccgatcatctactcgcttttgaaagcgacaggcacgggcggagcctttttaatgggttttattttggctaaggtgaaggtgaacaaatacggtctcctgtttgtgtcagcgggaatcatagaaggggcggcatttttcatcaccggcctcaacacttttctgccgctcgtcttcctcgccgcgtttgcgttcggatctgccgtcagcgcgattaatgtgccggaatatacgattattcagacgtctgtggaccatgatgatcagccgcaagtctatgccgtcatccatatgatctcaaacatatccattccgctcggcgcggttctttgcggatacgcggctaacgccttcggtcccggaaaagtcattgccgccggcggtctcgttgaagtcctgtccggtctcggaatattgctctttacgaagctggccaaagctgaacgctcagatctcatcagggaaaaagaagcgagcatcagaatatagatttttcgtgaaacgccctgcgccgtccggtgcagcggcgtttttttatgcgaaggtccggggggttatacgactccggtctgatatgaaaatcaatctctgactcgttttgccggccgcgggatttgtttatagtaaagacaaggaaaacgaaaggaggatctgcatgaatataaatgtaaaaacggcaggcggctttctgctgattgtgttcggactttctgtctttttcggaggaggccatttcgcatttatcatcccgctggcgatcggaggcctgatgctttactggggaatcaaacgtttttcaaaaggccgggcggtatcgggtatcatcgcgggcttcatcggagctatgattctcgtcggttctcttccatttatcgttgccatcggactggctggcgccatggtgtatttcgggtggaagatgatgaagcagggcggctcagacaccgcttcccgccagtatgaaccggaagcggcatcaccgggctatcaatccggatttgactctgaatgggaagaatttctgaagaaaaaataaggaggaagacaaaatggtcttaaaaagaataagaaatatgttcgtcgcatctgttaacgaagggcttgataaattagaaaatccgaaagtcatgctgaatcaatatgtgcgtgatatggaaagtgacattgctaaggcgaaacaaacgattgtcaaacagcacacgatcgtccatcagtttaagaaaaaacaggaagacgcttccgaaacggcggcaaaacggaaaaaccaggctcagcttgcttttgacgccggggaagaggagcttgcgaaaaaggcgctgactgaaatgaaataccttgagggaaaagcggccgaacatgaaaaagcgtatgagcaggcgaaaacacagctggcagagctgaaagagcagctggaaactttagaaacgcgcctccgcgacgtaaaggataaaaaacaggcgctcatcgcccgcgccaacgcggcaaaagcgaaggaacatatgaacgcttctttcgacaaaattgacagtgaaagcgcctacagagagtttcttcgaatggaaagccgcattgaagaaatggaagtccgcgtcaaatacggcacttcagctgaggcgaacacagaatacagccgctcccaatattcagacgaggtggaagctgagattgaaaaaatgcgctcgctttctctggagaaaacagagcatcaaaaagcggctcatgaataatgtgcacaagggaagatcggcgcttttacgcctcttccctatacgcacgtatcaattctccggcttttcctttataataaaatgaatgaaaaaggatggaacgtaatgaagcgtaagatggccaaaggactgatggcggcgtccgttctgatctgctgtctgtttttggtgaaagaagtgtttgccgggcgtttttttccgctgtacgaaacagaagcggaatcggcaagcataccgccgcgtgccgtcaacagcctgtcggtttcatcggaacagacggatgtaaaaatcatcgcggaagcgcggaatgatatcgcggcaaacatggcgggaccggcggggaaaatgtttgtccaaagcaggggaaaaaccctcaatctcaaagcgaaggagaaagggttccaatttctgaatctctttcagcgtcctctgctgattgtccgcattccgtatgattatcatcgggacattaccgtccatacgtcaagcggcaccattgccgttgacggaaacaaggggctgtctcttgcgcacctcggcgtccgttctgtaagcgggaatatgtcgctgaagcacgtgaagacggatgtgtttgaagcgaaagggctgtcgggcaacctcacagcatcaggccttgcggcgaaaacgggggatatccgcttatcctccggacatgtcgggcttcaacatgcggcgggcgcccttgacgtgcgggtcgcttccggcagtgtcgacgcctcgcttgagatggcggatgctcccgtatccgtcaggcttgcgagcggcagcgcagcgatcagcctgccgaaagacggaagttttacggtgaacgccgagacggcaagcggaaggattcagccgtcttattcctttgagaaaacgagtaaggacggcggggcattcaccggtatgaagggcagcggcgccaggccgattgatataaaagtgacgagcggcaatattgcactgcaatagtcaaggaaaggaggggcaggcagctgatggcaaaaaaacagattctcggacttatcatcgccttattaggcgtcagcatgtttttgcgtattatcggcatcggcgacttcttgttttggccgctcttttttctgatcacaggctatatttttaataaatattcccgcggctggctcggctccgtcctgtatatcttcgccgcttttttatttttgaggaacctgttcagcgccacctttaacctgttcggctatgccttcgccgcctttctcatatacgcgggctacaggctcctgaaaggaaagcgcgtgtatgaacataaagagaagaaaatcaatcttgaaaaagaagagcagccaaagccttccgcccagacggaaagcagacagccggacctccgcagcttttttatcggcgagctccggatgatgaaggacccgtttgagctgaatgatttaaatgtttccggattcatcggcgatgtgaaaattgatttgtcaaaagcgatgattcccgaaggagaaagcacgatgaccatcagcggtgtcatcggcaatgtcgatgtgtacgtcccgccggatatcgaagtgtccgtcagttcatcggcttttatcggcgatatgaacctgctcggctctaagaaaagcggcatgagcccgaatctttataaagtatcgtctgagtacggcgactcgccgcggcggattaaaatttcaatttctttattcatcggcgatgtggatgtgaagtatttatgaggaaaaaattactcgccaatattcagtggcgcgccatgcggatgactgcggggctcagtctgctcctttgtgcggtgtttattacgctgatgctgctgtattacgggcttgacccgatgctgctgttttcttccggctggttcggtattccgtttgtggtcatcctgcttctggcgtctctttcggccggattgatttccggttatgtatacggcggccgcctgaaaacaagaatggatacactgattgaagcggttttgaaatttgaaaacggcaatttcgcttatcgggtgccgccgctcggcgatgatgaaatcggcctggcggcagatcagcttaacgaaatggccaagcgggtcgagctccaggtcacatcgctgcaaaaactctccaacgagcgggcggaatggcaggatcaaatgaaaaaatcggtcatcactgaagaacgccagcggctggcgcgcgatctgcacgatgccgtcagccagcagctctttgccatttctatgatgacatccgccgtcttagagcaggtgaaagatgcggatgacaaaatcgtcaaacggattcgcatggttgaacatatggcgggggaagcgcaaaacgagatgagagcgctgctattgcatctgcggcccgtcactttagaaggaaaaggcttaaaagaagggctgattgagctgttaaaagagttcaaagcgaagcagccgctggatattgagtgggacatcagcgatacgggtgtgtcaaaaggtgttgaagaccatctgttccgcatcgtgcaggaggcgctttccaacgttttcagacattcaaaggcgaccaaggtcaccgtcaggctcggcgcgaaacatcaaaagctgcagcttaaagtcattgataacggggagggttttacgatggatcaagtgaaagcatcctcatacggcctgcattccatcaaggaaagagcgagtgaaatcggcggcatagcggaaattatctccgtgaagggaaaaggcacgcagatcgacgtgaaagtcccgatttatcagaaaacaaaaggagagaacgacagtgattcgagtgttactgattgatgatcatgagatggtcaggatgggtctggccgcatttttagaagcacagccggacattgaagtcgccggtgaagcatcagacgggcagcagggcgtcgatctggccgcagagcttttgccggatgtgattttaatggaccttgtcatggacggcatggacggcatcgaagcgacaaaacagatctgcgcgaaactcaatgacccgaaaatcatcgtgctgacgagctttattgatgacgacaaagtgtatccggtgatcgaagcgggagcgctcagctatttgctgaaaacgtccaaggcggcagaaatagcagaagccatcagagcggctgccaagggtgaaccgaagcttgagtcgaaagtggcgggaaaagtgctgtcaaggctgcgccattcagagaatcagcttccgcatgaaacgctgacgaaaagagaactggaaatcctctgtctcgtcgcggaaggcaagacgaataaagagattggtgaagagttgttcattacgattaaaacggtgaaaacccacattacgaatatattgtcaaagcttgatgtcagtgaccgcacgcaggcagccgtatatgcccaccgcaatcatctcgtgacataaaaaaaggagagcggcgccggcacactctcccgagggacggggtcattgggacattccctttgttccgaaatccctgatggcgactttgactttgtattcaatatccgattcactgaagtgatgatcccagtcagaggatatctttttccatttatcaggataatgaatccggacttgatcgcctaacccggtaatatccactttcaactcatgctgcatgtaatcaatgaatgccataacatctgaatgaatgctgcgttttaccgcgtttttgatttcatttatataggactccttgaaagaatcttctttcggattccaatcctcagacagacggccttcaacaaaccgggtgacgataaacttgaattttccgtttttatattgtgtttttacattatatttgctggaaaatacctcgaaagataaataataattgtcatgctttgcaaacgtgacgcctccctttaccgtgcctgtgaacaggttcatattctggacttgtaaaggcgttaaatttgcataccagaatttatttttaataatggtagcgccccagatttccagtctgctgcccactttgcgcacttgaggaagggcaaaggtttcgcccttggcgattttctctgatatttcccccaatgtcacgggctccatcatccggatggtgaccgaattattctccgttaagtcatagatcgtatttgacgcaggttctccctggtcactgatattgaaaatatctttcgttttatccggcaccgtcatcacattgcagcttcttctcgtaccgttgtctctgataaattggttcatcaatgcgtcaagcggaatgtcatcctttaacagcgcttcggaaaacagcatgatacgcaagtgctgggagaaggcggggtgattttttaacgatgccgttcttaatgcttgatggacggtttcccctggagtggaagtcacctttgtcgtgtcacctgacgacgactgctgggcacttgctttttgcggaaccagaatctgctgtgtcacttccacattttcttccgcgggtttatctagcccgactccgataacgaggctcaagtcttctaaattgcggctgtcccagcacccggccaaaagcaatgtgcaaaatatgattacgatgtatttcttcattgtgcttttttcaccttccttttcacagcgacgactgcaaacatcagtaaaggcagcaaaaagaaaaccaagaagatatagccgagaatatcactgaacagcatcagcttgtttccgtcttttggcaacaatgatccgaagaatgtcgcgatgcctacgaagatgatgccttttttctgtttcagcccgaaaattttatgaagagctgatgtcgcgaaatatccgtatgatacataggtggcgaaaaactggatgatccagacaacaagcaaaaaggactcgaacctttcaataaaaagccctttgatttcaaatgattgaaagagcgcgatcgttggccagatcattgttttgacatcctgggtggttaaggcgccgacgacgagaacgtaggtaatgatgtataaaataatcgggatgccaaagcctatggccgacatgcggaatgtgtgctttttatttttgaggtactcggggagaaacagcataatctcaattcccaagaaggaaacagaaacgacggtcaaggaagccataacgggagaaaatccctgcccgagcaccggccgcaggttgtccagatcaaatattttaaagctgaaagaaaacaccaccagcaaaataatgatcgtaatcgttaaatagaaaggaaagagcctgccgatatcgctcatgccgccgataattaaataaacggaacaggcgataaagataaacagtgtgaccggcacgggcgttctttccaataaaaagaacttgaccatttccgccatcgcccgggcttcgaagctggcgactcctataaaatagagacagatcatcagattgacgatatttcccgcccatttgccgagtccttcattcatataatcaaataatgatccgtactgatgctttttcataatgagcgtattgagataaatcaaaaagataaagatgacgccttccagacataacgcgatccagccgtccggcgaatttgccctggatgacagcgcccgcggcatggtgaggagccccgcgccgagcatcgtgtttgcaatcaatgctgtcccttgatagcttgtaagcttattgtgagttgttttctggctcatttacgtttttcgcctcttttggttgatttttaatagggagacggagaatagagtcgtttgcgttttttaagctgaaaaatccattcggcgagaaatacggagaaccgaagcttcgctgtctcgataaatgagtgtagatcgccagcataaataaaatcatgccgtacagcccgaaagctgccgcggtaaacatcgaaataaaacggagcacacggaacgacagacccatcccgtactgcggcaccgtaaatgaagcgagcgcgacaatgctgaccacgatgaccatgatggagctgacaatattcgcttcaacggccgcctggccgatgacgactccgcccaccaatccgatcgtctggccgagcgggctgggaagcctcaagcccgcttccctcagcagctcgattgtaatttccattaccatcgcttcaatgataggcgggaaggggacgttttctctgttcgccgcgatggtgactgcaagcgacgtcggcagcagcccttggtgaaacgaaacgagggcgatataaatggacgaaaaaaacagcgtgataaaaatagacgtaaacctgagcgcccggatgagcgaggcggaaatccaccgttcataataatcatcgggagactgcattaaaattcctaaagaagccggaaccaccagcgcaaacggcgagttgtcgacaaggatggcgacgcggccgttgaacaaggcggaagagactttatcaggccgttccgtattttgtatttgcggaaagggcgaatacttattatcctcaataagctcctcaagcgttccggaatcctggatgtcatccatcttcactttgctgaggcgctttacaacatcgctgacgacagacgggtccgccttatcatctatgtacatgaccgtggcgtattttaacttattttctccgatcggaacctttttcgttttcagcttcggatggttcgtgcgctgcctgatcatggcgatgtttgtatcagaatcttctatgaaggcgattttcggacctcttacgaccttttcggatgtgggttcatttacgcttcttttttctctttttcccgtggacaaaatgtatacgctgtcaagtccgttaataaacacggcgcattttccccgcagaatggagatgacggcttccttcgacgtaaagacgggacgggcgttgatcttatcaagacgtttcgccaccgtatccagcgtcagagtgtcttcctcctgaagcagcgtttcaatcgcctcttttattttgtcttcgtcgttcatttcactcagatacatataataaaaaacaagcccgttcggaagcatctttttattttgaaccaggtcatcattctgctctacgtggggaagcaccagtgccagattaacgtgtatgtattccttgaactccgattgcgtcatcgacagtcacccgccttccaatccttaattgaggttatcttttcctgttaaaaaaatgatatactatgataaagtatttaatggtacaagtttttttatgaaagcggaggagagatgtggcacaagtcagactggcaggaaatgccgaagaaattgaacagctcatcaaatcatttgaagcgcattacgaagtggcttacacgtcgaaagaataccgtaaaacaaatccgaagtataaatactctaaggattcgcgcgtctatcttgagctgaaattaaaaacggccaaggccgaaaaataaaaagggtttcatctgttactggcgaataatactcagggtgaagcaactgttatggagggatacataaatggactacagaattgaaaaagacaccatgggagaagttaaagttccggcagataaattttggggcgctcagacacagcgcagcaaagagaacttcaaaatcggttcagaaaaaatgcctcagcgtgttgtgaaggcgtttgcaatattgaaaagaagcacagcgatcgccaacgaacgcctcggcaacttagagtctgaaaaagcccaggcgattgccgctgtatgtgacgatgttttaaacggcaaatacgacgataactttccgctcgttgtctggcagacgggaagcggcacgcaaagcaacatgaacatgaatgaagtggtggccaaccgcgcgactgctttattgaaagaaaaaaattccgagctgaagattcatccgaatgatgacgttaaccgcagccaaagctcaaacgatacattcccgacggcgatgcacgttgcggcggttcttgccgtatatgagcagctcgttccggcgcttgatcagctgcgcgcgacgcttgatgaaaaagcgaaagcttatcaggatattgtgaaaatcggacgcacgcatttgcaggacgccactccgctgacgctcggacaggaaatcagcggctgggtatacatgcttgaccgttcgaaagaaatgattcttgagtcaacggaaaaaatccgcgcgcttgccatcggaggcacggcagtcggcacgggaatcaacgcccatccgcagttcggtgaattcgtcgcggaagaaatcacaaaagtaacggggcagacattcaagagttcgcctaacaaattccatgcgctcacaagccatgatgaaatcacttacgttcacggcgcgttaaaagcattggctgccgacctgatgaagattgccaacgatgtcagatggctggccagcggcccgcgctgcggaatcggcgaaatcgtcattcctgaaaatgagccgggaagctctatcatgccgggcaaagtcaacccgacgcaaagtgaggcgctgacaatgatcgccgcgcaagtgatgggaaatgacgcgacaatcgggtttgcggccagccaaggaaacttcgagctgaatgtcttcaaaccggttattatttataacttcctgcagaccgtgcagctgctcagtgacggaatgaattccttccatgacaaatgcgctgtcggtattgagccgaaccaagagacgattcaggaaaatctctctaactcattaatgcttgttacggcgcttaacccgcacatcggttatgaaaacgccgcgaaaatcgccaagcttgcccacaaagaaggcctgacactgaaagaagcggcattacagctgaaccttctgacagaagaacaatttaatgaaatggtgcgtccggaagatatggtgcacccgaaagcataaaagaaagaacggctgcagtcattgcggccgttcttctaaataaactgctgtttcagtaaaaatctgagctgttctgcatcttcagccagcaggtcggattccttcaaattcaaaatcattcctttgatgattgccggtttcggcgactttttcttcatttccgcttccagaatatccaagctctcggtgaattcagatgcttccgccttgtccatcgtgccgatgcgcgtgcggagggtctgcaagatcgattggcttaaaggatcgggctgcccgttatgaaggggcccaaacagtgagcttgcctcatcaagagaaataaatgcttcatcatgtctgcccgccattccgtttacgatgtcatcaattctgtgaatcacggtatttgccaaaagcgaaggctgtacggaccggccggtcagaatgagatattcaagatacatctgactgattccttctattaaaaaacaaagctcggctgtgtatggttcagctttttctccgtaaacagcaagaagactgtcgatatgaaactgcaggatcgaccggcggattctctttccgcactgcgccgcttcttcggtataaggaagtgaaccgtctttcatctgcatggtaataaaatcctgatgggcgagaatcgattcgtaaaacaccgcaagctgtttttgataagcggctctcggactgtcaccctccgtttggatcgtcgtgattcgggtaaacgttttatcatagtagtaattcagcatggataggagcagtgcttctttggaaggaaagtaaagataaaaagcgccttttgagattttgcattcatcggcgatttcctgaaccgatgtagatttgtacccttttcgggcaaacagtttgattgctgcttcaatgatcagcttttctttttccttcaatggttccaccctttcggagccaggaggctggcttgtgcttctcatgtatgactatatggtcatattgatattccgtaaatttaacctgattgtaacttgtttttttgttttgttttatttatattataaagtgagctgaccgaatggtcaaagttctggcgaaagggtgaatctgaaaatgaaagaattagatgaaatgatcagccgcttgcgaaacagaggaattaaagtcgaaaaggtgaaatatccgaaaaagacaatttgtgaaaagaaatgggttcatcaatgccaaaaaccgctgaaagcaaactacagagattttaacggctattccttcacataaaaaaagactgcaatgaaacactacagtctactttggtatgataattcggtagattacacccgattggtcattttcaattgaaattgatgctttatgcagggttaaaatccgttttacgatgctgagtcctatgccgaactcgcctttcttccctttattaaaaggctcgtacaagctggatagcatctcatcctcaatcggaggcccgtcatttttaaccgtcatgacaatctgctgctgattttggctgatccgaatgtgaatcgccgtttctgcatagcggatttgattttcaagaatgttttcaagaagtttgctccattgttccggatcaccgggcatcattaatgcatcttctgtatcaacgctccacaataattccttccgggcccatttgagccgttcaatgacttcttccgtgaccttcacaatgtcaaatgtctcatggtgcacccgctgcttcattaaataatcaagcttcgttaaatataataaatccttaattttcttctcaagtttttctgcttcgccttcaatgacatcaattgtggtttccagatcccccttaggaaaaatcccgtcctttattgattgagtatagccccttatcaccatgacaggcgtttttaaatcatgagagatattttgcaggagcgttctttccgtttcatccttttgcaccagcttgctccgcatgtcttcaatggtatggcctaattttccgatttcgtcttttctgtcgacgatgaccggatcatcccagtcctgttcggaaatccgtttgacatgcttctctaaggaaacgagcgggcgtgagagatatttggcaagccaaatcgccggaatccagcttaacaaaatcacgccggcaatgataaaaagcagctgcttgaacagggtgaatgccagatcatcacgataagaatcaagggcgtaagacagcatcatcgcatcctggccgttaatggtgaggccttttttaatgacgaaaaaaactttttcaccgctgatgtccgcgctgtatcgtttcgtgacgctgtgctggcggcccgcgagcttgtacaccttatggataaaggaagaagaaaaatagttcaagtctttgtcactggccgattcctcccgctccggcagaagaacgtgctgaacggatcggaaagtcgtcggagcggtcgcatcctcgctgtaatatccccgctcgatcgatccgggcagccggtactccgtcagtacatgctgttcattttcaatggtcgtatacgtttcatccgtgaaaaaattacgcagcgtatttgagaacagcacgagaagcagaatcgagatggctaagaggatgcctgagatgaccacccatatttgaaaagcaagcggcttatttttcatgacgtcatcatcctgtagccgaatccgtaaatggtctcaacctttaacccgggcattttttttctcagcctccgcacaaggtcatcgaccacccggtcagtgccgaaataatcatggccccatattttcagcaggatatcttctctggaaaaggggtgtcctttatggtgaagaaataaaagcagcagatcaaattccttagacgtcaaattgaccaggctgccggtttcatcataaacctcccgggcatcttcgatcacattgtaggaagaaacggtgatgccggttttctttgcggcgggctgttctttatacacgagctcgagcagtttctggacccgtataataagctctctcggcaaaaaaggcttggcgatataatcattgcttccaagctctaacccgaggactctgtcaatatcggcatcccgcgcggaaatgaaaatgaccggcacatcgggatctttttcttttatttcttttatcaatgtatagccgtccgtatccggaagcatgatgtcaagaatccacaagtggggagacggctgcatctgctttctggcatcttcgccttttgtgaaagatgtaatgttccagccttcattctctaaatattttgtgagcagttcattcaggttatcctcatcttcaactagataaatggtgtatgacaaggcatttcacatcctttcaacgtcattatactagttttaacatactcaagccgcattttcataatttcacatattcttttcatttttatcccacaatgtttgtttatgatgtgtataagggaagaaaggaagaaaaaaagcggggaagataacatgttcaaacacattttgttttggagctttgcttttctccttattattgggacaatagaacttgtacatgcgatgaatatgtaatcgatagaatgaaaacatgctgaaggagtgtgcgtgaatatgaacgatcatcgagatgacggcagaagccgcgatcagtcagatctttcacatacggaacaaaacagaaatgaacagcagcagatcagccatcaggagcccgagctgcttgaagggaccgtctcgaaagaaccggaaaacgagacggctgccggtacggaatttgaaaaaacggctgccgtgaaaaaagaaaaaaaacggagagccgcttggctgagcccgattttaggcggcattatcggcggaggcctcgtgcttggcattgtgccgaacctgccgggtgagcagcataagacagaagccgtttctgatacgaaacaagttcagtcttcgaattttacgtcaacgcctttgaaaaatacctcaagcgtagcggatatggtggaagaattggagcccgcgattgtcggagtgtccaactaccaagcttcgcaaagcagccagttcggacttgacggcggttcaagctctgaaacggaaagcggcacggggtcaggcgtcatcttcaaaaaagacggcgaaaaagcgtacatcattacaaacaatcatgtcgtagaaggggcgaacaaactgtcggtcactctttacaatgggaaaaccgaaacggcaaagcttgtcggaaaggatgccatcagtgacttggctgtattggaaatcagctcgtccaatgtcaaaaaagcggccagcttcggggattcctccaagctccgcattgccgataaagtgattgccatcggcaacccgctcggccagcagttttccggcaccgtcacacaaggtgtcatcagcgggctgaacagaacggtggacgccgatacatcccaaggcacggtggaaatgaacgtgattcagacggatgcggcgattaaccccggaaacagcggcggcccgttaatcaactcaagcggccaggtcatcgggatcaacagcatgaaagtcagtgaaaacggcgtggagtcgctcggctttgccattccgagcaatgatgtagaaccgatagtcgaccagctgcttgcaaaaggaaaagtcgagcgcccgtttttaggtgtgcagatgattgacatggcgcaagttccggaaacctatcaggaaaacacgctcggactgttcggcgaccagctgtctaagggtgtttacgtaaaagaagtgcaatccggctcaccggctgcgaaagcgggcatcaaatcaaatgacgtcattgtacaactgaacggcaaagatgtcgacagcagcgccgatatcagacagatcttatataaccagctgaaaatcggcgataaaacgactgttcaagtgctcagaagcggaagcaaaaagacgctgaacgtcacattaacgaaacaaactgaaagcgcaagctgagcgcataaaaaaagctgaaccttcaactgaggttcagcttttttcgtcattctcccaagtaggctgacagcatccacacatgcttgtccgcttcttcaactaatccgacaaacaggtcggcagttgacgggtcattttgttcctctgcgatgccgatgacaaattttgattcgcggctgatttgtttatagtcttgaaccagtgatttcaccatttcagaagccgttttttcctgaccttcatccgtaatggaagcttgttcaaggtaagtgtgcaaagtcgccgcaggctgtccgccgatggccagaagacgctctgcgatggcgtccgccgtttccgctgcttcgttatacagttcttcaaatttttcatgaagcgtaaagaagtgagggccttttacataccaatggaagcggtgcagtttagagtaaaggataaaccagtttgataattgtgtgttcattgatttctcaacaagagtttcagtttttttcgcgttttgtgtattcatattcatcgtcctccctgtgatctgttaatttaattatatcacgtatcaaataaaaatcaatactaaattataattattataatttagtttaagtgaacagctttttctttataatcgattcccaagcggaccacggaaagagtgagcggaaagccaatgtcagcttaacgcccctgccgatcggataccgcagtttcttcagccgtttcctttgtgccaattgataaatcagctccgctacgtcatcaggatcgccgcttttggatgcgttggctttgaagtaagcttcaaggggctgataaaagcgataataaggcgagtctttgccgggcgccgtaatatggctggagagagacgtctcccaaatagacgttttataggagcccggttctattaaagcggcatcaattcctaaaggcagaagctcgaggcgcagacactctgtaaacccttcaaccgcgaacttggaagagacatacggagatagagccgggaaaccggtcagtccgctgatactgctgatattgaagattttcgccccgccatgtttccgcatataaggcagcacggtttttgtgacgtgaatcagaccgaatacatttgtttcatactgctgtctgtaatgttccatcagcacatcttcaataaaccctccgtacgcagtgccggcgttattgacaagcagctcaatcggtccgaaaccgctgatggtgttcccgaagtcagacaccgactgctcatttgtcacatctaaagaaacgaccgtaatatatgcggatgcacccgcttgagcggcggcctctttcagtattacagctttctccggctgtctggctgttgcgatgacgtgataagaccgggcgagcttcagcgctgtcagcatcccgaatccgctcgtcgcaccggttacaatggcaacttttctgttcatcttataatcctccccgtttgtcgtttgttcttatctcatagtgtataacatctcgcggaaagaaggagaaatcgttcggaaatatgtcagaattgttttataatggagtcagcttcggatagaaaggggtaaagaaaagatggcattagagggattgaaggaaacatgggatttaaactccatttttgagggcgggagccggtcggaagagtttcagcaatacatacaagagctcaaaaagcatctaagcgcttttcaacatgcggttgaagcatttacagttccgacgcacgcggatgaaagccgggagctgatcaatctgattgataggtttgaacggtcagcgatcatgatcaggcaggcgggagcgttcgtcggctgtcttcaggctcagaacactcatgatcagaaagcgaatgaatggagagcgcggatcaatcagctgagcagtgattttaaatccgctctggtcacccttgacgatacacttgcccggattgacgagcgggtctgggaggagctcctgcaaaaaccggaacttcaggatctcacatatgttttaaatgagagaagagaccgggtcagagagaagctcagcgcttcagaagaaaggctgattgaaggcctggccgttgacggctatcacgcatggggcgacctgtataatgcggctgtcggcagaatgaagattccgtttgaggataaagagctgtcggtcggccaagcggaaaatatgatggcgcacccggatcgccgcatcagacgtcaagtgttcaaagagcttaatgaagcctggaaaggagaagaggagcttttcagcagcacgctgaaccatctggccggcttccgcacggaaatctataaagcgcggggctggaaaagcgctttggaagagccgcttgcgatcaatcggatgaaaaaagaaacgctggatgtcatgtggcaggtcattaccgatcataaaaagccttttgccgaatacctgaatcgaaaggcgtctcttttagggcttgagcggctgaactggtatgatgtgggcgcgccgatcggcgaggcttcgaaagaatacacatatgatgaagcggctaatctgatcgtcagccaattttcgacgtttggcaaaaagctgtccgcattcacggaaaaagcgttccgcgatcggtggatagaagcggaagaccgcagcggcaaacgggtcggcggtttctgcaccagctttcccgacagcggagaatcccggatttttatgacgttttccggaagcgcttcgaacgtatcgacgctggcgcatgagctcggtcacgcgtttcatcaggaggccatgctccaagtgcggcagctgaacagagcctacgctatgaatgtggctgaaacagcctcgacctttgcggaaatgatcgtcgccgacgccgctttgaaacaagcggagacaaaggatgaaaaggtgttcttgcttgaagataaaattcaaagaagcgtagccatgtttatgaatattcatgcgagatttttatttgaaacgcgtttttatgaagagcgcaagcagggcgtcgttccggctgagaaactgaatgaactgatggaagcggcgcagaaagaagcattttgcgattcattaggggaataccaccctcatttctgggcgtcaaaactgcattttcatattacgggagtgccgttctacaatttcccgtacacgttcggttatttattttcgcttggaatatatgcaagagctcttcgggaaaaagcggattttgaagaaaaatatatcgcgcttttgtgtgacacggcttcgatgaccgttgaggatttggcgatgaagcaccttggagcggatctcacggaacggtcgttttgggaagacgcggtccgccttgccgtacaggatgtgcaggaatttttagagctgactgaatgataatctggagatgaaccggccggagctgttaccgctccggttcttttttgttccgtgaatgacagccgcctcccttggaaatacctaaaaacgatcggaatggaatgggagtgaatcgcatgaaatggatcagaacggcgggcgttttatgtcttacgctgatgctgattgccggctgccgattgaatgaagaaaaacgggaagcggaacaagacagcacacctgtgtcatccgagaagccggttccttacagcagcttttccctgcgcgtcagctacggagccggagagcataaccgctatgaaggtttgtatgaaagaaaaagcggtcatgaaaaggcggacatccgggacaagctctcaggggttcacagagagggcgaggaagcgcttgatgaaatgaagatgatcctcggagaacttgccgtaaacggccggatgcaggaaagcgaggtcgtccgggaggtgctttcggcttttaatttggacagccgctatgaccatttttatctaaaactgaaaaagaacgatggagtaatgacggaaataaaaaaataaccgccgcccgctgcttttttacccaaaactaattgataatgatattcagagtcattaatttctgttacaatataatcatgatctcacgttgaatgtttaggcaatttgtttatatacatagtgttgggaaactcaaaaaaggagcggttagcggtatgagtgcaatttctacagagacgctgagcttagggtacggagagactgttatcattgacgaattggatgtcgcgattccaaaaggcgaaatcactgtattgatcggaagcaacggctgcggaaaatcgacgcttttacgttcattggcccggctgatgaaaccgaggggcggttctgtgcttttagaaggaaaagccatcgctaagcttccgacgaaggaagtggcaagagagctcgctattttgccgcagagtccgtcagctcccgaaggcctgacggtgcatcagcttgtgaagcagggaagatacccttatcaaagctggctgaagcaatggtccaaagaggacgaagacgcagtcacaaaagcgctaaaagcgacgaagcttgaggaaatggccgaccgtcctgtggattccttgtcaggcggacagcgccagcgtgcatggattgcgatgacactcgctcaggatacggatatcattctgcttgacgagccgacgacttatctcgacatgacgcatcaaattgaaattcttgatttgctgtttgaattaaatgaaaaagaaaaacgcacaatcgtcatggtgctgcacgatctcaatctggcatgccgttatgcccattatctggtcgccataaaggataaacagatttacgcagagggccgtcccgaagaagtcatcacttgcgagcttgtacagcaggtctttgcaatgaactgtcaggtaacgcaagatccgctgttcggcacgccgctttgcattccgcacggacgcggcagatgtatcgtgcaggaagcggccctcaccgcccgattgtcataatcatgaaaaagggaaggaaacggtatggaagaaaaactgcagcagcagctggacggcctgcttgagaaatacactgaactattgcttggcgaaacaaacccggatgtaaaggaagaagtcaggcagtggattttgtatacacatatcgcaaaaagcatgccgccgctcgtcaaacattggaatcaatcctacccggacgccaaagagggcatcaaagctgcgatacagcacattaaacagctcaatgaagctcacagaaaaaaacaataaaaagctttcggcatcaaagagaggtgccggaagctttttttgctgaaaaggaatcaataaaggcgccgttcaattcataacgaagaactttaatgtaactaacacacccgtttgtttacttgctgaaccaagaaaaaaggaccgccgcagcaatcccttactctttcctatatatcacatttcctttcggatacgtaataactcttcaaatgcttttatatttgtatcaaaattgggcactgtttgagattcctcggcacatttgacttgtgctacaaccaaatcattaaaaggtgttgaaattccagtaccttctgccattttgggaataactccattaatataatcaatttcagttttgcgttttttctcaagatcctgaagcatacttgctcttaaaagcctggatggttccatggctgccctaaatgtttgaatacgttcaggaatctcattttcactttttaattccaaagattctaaatcaaggccgcccattttcgcaaatgtgacaccattggcgtgtccaaccttaatcgtctcatctgcgatatgaactgcgctgacaatgccgatttcatggtcaagaatatcaccgtattctccgtttaatgctgccgataaaccactgaatgcattattgataagtaattttgaccacttcgttccaactaaattatcggaaatatgtgttccgccgataaggtctaaaaccgatttaatacgctggattctttctgttgtttcaccatttaattctccaatttgaaaagcgtactctttaaattgagtatactcagttgtaagtctggatacgcctggttcaataaacgtagcaccaaattcaacagaacctgcaataacacgttcaccaccaacgatcgaagcaactttctgttcaggtataccgttttgcaaggaacatactacactatcatcctttaaaaaaggcagtaactctttaagaatggagtcattatataattgtttcgtcaggagcaatatgaaatcatacttgcctgacttgttttcaggggtaatggcttttacctttgcctgaaatgccgttgtaccaactactttagcacctatttgatttaaagtatctacatgttctttgtatgaatcaattaattcgacatccattccgccagcagacagatatgctccaactatggttcctaaagaacctgctcctaaaattgcaattctcattgtaaacgtctccttatttttcctctaagtagttataaaccggctgtgctgcatttaaggttaaatccgtaataatatgagatgctgaaacgacttctaatacaggcaaatctgcaagaggcgccagagcatgttcaaataattgaagccgcgccggtccagaccaggcacctttaacttctatattcgttatttgcgtgcgcaccaaatcgcaaacccttaaatcaccattgtaatcagtagcaatcttaaccataaaattaggtcggcaaatttcccttttcgctttttccttgtccatttcgaaatgtttatatcccatagtcgcagctgccacacgaagactgccataatctaatgtgccaacgagagtatcagagtctatatacagcttaggggcgcccaatttctttggatatgcagtaagttcccgtccgcttgcaatagccgggaaattgtctacatacatagagtgtacataatctccttcttcaccattaaagctgacagggatgacttgtcctgcctctgtataggcaccaagtccggaaacatcgggcatccgcatcacttcgaatttcactaaaggttcagtaatttcaagaggttccggcactgccgcacgcaaagctttttcatccgttcggtaaataatatttaaatattcacggttaacaaatttataatttgggataggataagcaggagccgttagcggtgtatttaaattttttgctatatctttcacatcaattttcattgcatgacaccctttccttttctttaactatgctattatcttacatccgcatttacatttaatctaatacataataaggtatatatatatttattgaaataaataagggggatgcagacagatggaattgctgcagctaaaatactttcagacagttgcctatactgagcatatttctaaagcagcagaacaattaaagattgcccagccttctttaagtctcactataaaaagacttgagaatgaactgggaacagctttgtttgagagaaaaggcagaaatattaagctgagttcatcagggaaaattcttttaaaacatgtaaacaggatttttactgagattgaaaatgcacaaacggaaattcaattggaggaacatcaaatgtctgacaccatcagaatatctatttctaatccgagattccttgcaggactgatgagtgaatatatcaaccgctcccctcaatcaaaaattctccaagccatcggagttaaaagcgggatcctaacaagtttaaaaaaaggggacattgatttaggaataacaggtcatcctattcaagatgaagagatagaaagttgtatgctggtaaatgaagatattgttctggctttgccctcaaaccaccgatttacgggtaaaaccgaaatttctttacgtcttgtcgccgatgaaccatttattacccttgctaataatgaagagtatagcggttttacagcctcgctttgtgaaaaagccggtttcaccccaaatattgcatttgaggcggattctcatttactggccgagattataaagctggatcagggggtggcgttgcttcctatttcggtttgcagaacattggggctgaattttataaaagtgactgatcactctgcttcatatccagtcggcttatcttggatgaaacataagctgttatcttcttcggtaagaaattttcgtgactttattttgtcgtactataaagataactatgaaatgtttaaggtttattaaataattttcacccccgatttccaatgaggcggaagactggtcattcggaaacggagaggcccagatgatataaaaaaatcccgcggcatccgcgggatttttctttgttaaacggctttcgccttttcttcttgtttgcctgtctttttgtttgtcagcttaattgatttaacaaacagcgtgaggatcaatccggcagcgataaaggccaggcctgtgaaaaacacgctgtgaagcgaatccatcagtgacgttttcaaaaccggcacgatatgggaagaaaatgcggccgggatctgcttaatcgattcctgactgaacaaggattgaagcagcccttcaggatttttgtcaatcatacctttaaactgggcggcaaaggcacttgcctgtttcgggagtgagtctaagtaaggcaccagtctgtcggttaaaaggcttcctgatctggcattcatgacagcgccgagcaccgtaatgccgaacgttcccccgatcatccggaaaaattggcttgatgaagtcacaacgcccagctcttcttttgaaaacgtttcttgcagagcgagtgtgagaagcggcatgacgagccccattcccagaccgatcactgccatatagcacgtagccgcgagcttgcttgtatccagctgtaaggtcgttaataagaagaagccgacggccatgatcagcatgccgatcatgatttgcggtttaataccgatcttataaaccagctggcctccgataatacttgtgataatcatagataccatcatcggcgtcataatcgtgcctgacgcggtggcgctgactccgataattccctgcataaagaaaggaacgaacgtaacggcgccgaacatgccgatactcatgaaaaacccgatcagattcagtacggtaaacgttctgtttttaaacaggtacatcggcagaatcggttcttttgctttgatttcagcgaaaatgaatccgacaatcccggcaagcgcaagcgcaaagagaccgagaatctgccaagagccccatgcgtaatcttttcctccgaagctgagcgcgagaaggaggctgacgattccgacaatcattgtgaaaatgccggcgatgtcaaagttaatcggcccagtctgttttctgccttgaagtcctcttgcgataaagatcacggctaaaattccgacaggcaggttgatatagaaaacccatttccaatttaatgagtcaacaatccagcccccgatttgcgggccgataacggaagcaaggccgtaaatcgctccgaaaagcccttggaacttggcacgctgtttccctgtgaacaaatccccaatgacgatcatggccatcggcatcatgacaccgccgccgattccctgaagtccgcggaaaataatcagttccgtcatgttgctggccattccgcacagtgcggaagctcccataaaaatcaataaacctgacacatagacgacgcggcgccccaataaatctgcaagtttccccgcaatcggaacgatcgtcgtcgaagttaaaagatatgccgtggtcagccacgtcatcatgcttaatcccccgaggtcacccacgattttaggaatcgccgttcctacgatggtgccgtcaagggctgagaaaaacatggcgatgattaagcccgttattaataatgtgcgttttggatctttcttttcaatgctcatgtttcggcagctcctctttctattcgttttctttttgatcagccgcgtatttctcggcggcttccgctactttgcggatgatgttcacggactgaatcagttcatcgtcagtcagaacggacaggttacgcgccagtatcgctttccgtccttccacaacatcttcgaattttgtttcgccttttttggtgaggctgatgtcgatgacgcgtctgtcctgctggttatgtttgcggacgataagtcctttttgttcgaggcggtcggccatcagcgtaaccgcgctcggctttacctccatgcgttccgcaatttcggaaactttgcagctcccgtgttttttcaggctggctaaaacaaataattgggcaggcgtcacctcgtgttttgccatgctttccaccatttcaggctgtatgttttgcagcagcgtctgaagagatttctggatgtcagacacatattgatccgcgtttttcataactcctcctcatcttgttccttgagaaaataattaacattagttaaatataaataaggattaatgataagtcaatctttttgtgcaaaaataaaaaaaggactgatgcttggcgaaaacatcaaatcctttttcattttactgctggtagggagactgctgctgaatggtctgccggaacttctgatacgattgctgaagcttttgggtatcggcggcttcaatggaataccagccattttgaaacatcacatcgtataatcttctttgcgctttttgtgactcatcgaaaatcgcctgaatatcttgataaagagactcgtggctgaactcgtgcagggctgtgcaatatgaagccgtgatgtatttttccgtcgtcagcagctcattgaccaagtctctgtcattcatttgcgccgtattgggcacgggcgtttgcggattcgtgattttttgattttgctgttccatgtattgtcctcctattgcatatagcctgttgttgtctgtccgccttgaccggggttcaagcggcccaatatgtgctgataatgcttctcatgcatccggccgatctgatcaagctcttgttttaacgtctgattctggcagtgttccgccataaaatgcgcttttttcatggcaagcagattccagttcagcatgtcctcaagatacaaatggtctttcgttgagatgacggcaggcggcaagtttccgtgctgctcttggttgttcatataaacgcctccttcaattctgttctttttagctttctctgcgatcgggatttcatacagataaattaaaataaccacgatttgcaggagagacatcaatatttacaataaaaaaagacactatcagaagaaaaaaccttcggataatgtctgttcatgttaacagttcgatatatgcgaaagtcagcagcggcactaggattggacttcagctgccggtttattgtctagatcagtgccggcttttctttcagttatttttatttttggtaaaagaaaagcagaaaatactccggcaattaatagtataagccctgcgaaaaatacactgcgaagagagtccattaacgctgtcttcattatcggtatgatgtgctttgctatagaatgcggaaattgttcgaatgaaccagaactgaatagcctctgtagcaggacttgaggattgctgctgatcaagtctttgagatgagctgctaatgcgttttcttgttttggaaaattgtctaaaaaaggaactaatttatcggttaatatatttcctgacttggcattcatcactgctcccagaatcgtaattccaaacgtacctccgatagagcggaaaaattggcttgacgaagtaaccacgccgagcgtttctttagagaaactctcttgaagtgccagagtaataatgggcataacaaggcccataccgaagccgatgatagctacataagtagttgcagttaatttgctggtgtcagcttctaatgtggataataaaaaataggcaaaggatatgattgccatccccgtgataatctgcgctttaatgccgattttaaagaccagctgcccgcctataatactggagataatcattgcgaccatcatcggcatcatgattgtcccggactctgatgcactcatgccgattattccttgcatgaagaaagggacgaaggtgattgctgcaaacatcccaatactcataaagaaccctattaaatttaagaagataaaagttctgctttttagaagatgtataggcagaattggttctgcagcttttttttctgcaaatacaaaactaataatacttatagtggccaaagctaacagacaaaatgtctgccatgataaccagtcaaattcttttccgccgaaactgagtgtaagcagcaaacagactacacccgtaatcattgtaaacatcccgatgaagtcaaaatgaatcggacccgtgtattttctggcctgcaatcccatcgcaataaagaacacagctaccattcccacgggtaaattgataaaaaatacccaatgccagctgaaagaatctacaatccatcccccaatttgcggaccgattacagaagcaagagcgtaaataccgccaaatacgccttgaaatctggcacgctgtttgcctgtgaataaatctccaatgacaatcatagccatcggcatcataatgcctccgccaagaccttgtaaacctcgaaacacaattaattctttcatgttatcagccaggccgcacagtgaagagccaatcatgaatataatcagcccggccacatatactgcccggcgccctaatagatctgcaagttttccagcgatcggaacgatggaggtagatgttaataggtaggccgtagtcagccaagtcatcatgctcaggccgccgagatctcctacaatcttaggcataaccgttcctacgattgttccgtccagagcagaaaaaaacatagctataataagtccaattaataaaagtgtacgtttagattttcctgttgaatccaattgaaggttccctcttttcatatgtttcgagcttagtgattcttcaaaataaggtgaatggataactcaggcaggtcccttctttaaattccgttagggaagagaagccatctttaaagatgaaggatcgtaaagctattagaaagaaataataatgctttggaggtatgtttgtgaggcaaagataaattcagcagaattatcattttgaaattctgcttttccttcttaatagatacgttcaataaactgaattatcaattttaaatataagccattgtaaattataaatcaattatcttttaaggaatattttcaaattataaggggataaagaaatataaattataagtttttttgggcgaaatgtaacgaagaagcggaattatagctcgaaaactcaattgaagaagtagtgatttttattgatcctttttgtgactcattaaaaccgtttgaatatcttgataatataatacattgctttgacatcagagtctgtatggatatatgaatgatatcttggcaatctgcatggcttttgtgttttagctttctctgcgatcggaaattcatacacgaataaaagaaaaaggagggagttcatccttgctgcggagcatatgtttatttttgtcgaaaaataaaatgcttacaaaattcgcccaggcttacggaatccgcttcggcgcgggaaggttcgttgcaggggaaacgctcacggaagctgtgaaaacggtaaagcggctgaaccaaaaagggctgtcggcttcgattgattatctaggtgaatatgcgggttcagagaaggatgcgaaaaagacggcggaagaatgtaaaaaagcaatcagggcgattgccgagaatcaactggattgtgagctgtcgctgaaattaacatccatcggtctggatatttccgaggaactcgcggaacagcatgtcagagacatattgacggaggcaaaagaacgcggcgtgcctgtaacgattgatatggaggactattcaagatgcggccgtacgcttgagctgtataagcggtgcaagccggattttccgatgctcggcaccgtcattcaggcttatttataccgcgcagctgaagacatcagcggtctgatgccatataagccgcggctcaggcttgtaaaaggcgcttataaagaatcggcggccgttgcgttccctgataaaaaagcaaccgatcttcattttcagcagctgattaagctgcagcttttgagcggctatgaaacggcggtggcgacacatgatgacgatattatttcgtatacgaaaacactcatcagcgagcatcagattccccgggagcagtttgaattccaaatgctgtacggcatcagaacggagcgccagaaggagcttgccgaagaaggatacaggatgagggtgtatgtcccgtacggaaccgattggtacgggtacctgatgagaagaattgccgagcgcccggcaaatgcggcgtttgtgctgaaaggaatcttcaaaaaataacggctgctccaaaaagcagccgcagtatgttattccatgttgtcttttttatattgctgattttggctcgtccgtttgccgccgccgtatttttgcttcggtcccgcatttcctttcatgctggccgcgctcactgcggcagaagacggatcttttctccctcgcaccattcccttcacctccgggtttaagtttcccgcccgcgccatggaacatgcggaagccgaaaaatttaaaaaaattccatatttgctattgaagtcatcctgaaaatcttttaagatgaaagaagaaaagggtttcattttttttgccgaaaaaatgaatgactattcattcaaagttcaagggggatgactcatgcacaagtttataaagaaagcagccgttctcggatcaggcgtcatggggtccggaattgccgcgcacttggctaacatcggaattcccgtcctgctgcttgatattgtgccaaacgagctgacaaaggatgagatgaaaaaagggctgacattagaaagcccggaggtccgcagcagactgagccgatcggccatgcaaaagctgctgaagcaaaaaccggcgccgctgacttcggctgccaatctcgactatataacggcggggaatttggaagatgacgcagctcaattgaaggatgctgattggattattgaagtcgtcgtcgaaaaccttgacgtaaaaaaacagattttctcactcgttgatgaataccggaaaccgggaagcatcgtgtcgagcaatacgtccggtatctccgtcacaaaaatggcggaaggccgatctgccgattttaaggctcatttcttaggaacccatttctttaatccggcccgctacttgaagcttctggaaatcattccgattcaggaaacagatcctgacgtgctggagtttatgacttcatttgcagaaaacacgcttgggaaaggtgtcgtcatcgcaaaagacacgccaaactttatcgccaaccgcatcggtacgtacggcctgctggtcacggtaagagaaatgctttcttccggctgccgcatcggcgaggtggacacggtgaccggacctttgatcggcagaccgaaaagcgcgaccttcagaacccttgacgttgtggggcttgatactttcgctcatgtggcaaaaaacgtatatgataaagccgacggcgctgaaaaagacatgtttaagcttcctgaatttatgaatgacatgctgaaaaacaattggctgggcagcaaatcaggccaaggtttttacaaaaaagaaggtaaaacaatatatgaactcgatccgctgaccatgacatacggtgagcgctcgaaaatgaagacgcccgctttagaagccgccaaacaggcaaagggtgccaaaggcaaaatgaaagcgcttgtatattccgatgaccgcgccggacgcctgctttggaatatcacatcgcaaacactcttatactcagcccggcttttaggtgagatcgctgatgatataaaagcaattgatgacgccatgaaatggggcttcggatgggagctcggaccgtttgagatgtgggatgccatcggcgtcagaaaatcagcggagcggctcgaagaagaaggcgcagcactccccggctgggtgaaagaaatgcttgatcagggtcatgaaacattttatatgaaggaaaacggaacacaattttattattcagacggccaatacagggctgtgaaagaaaatccgaaacggatcagcctgcagacgttaaaagaaacaaaaggcgttatcactaaaaacagcggcgcaagtctggttgatctcggcgatgatgtcgcgctgctggaatttcatacgaaaagcaacgcgatcggcttagacattattcagatgattgacaatgcgcttgaggaaacggagcggaattataaaggtcttgtcatcggaaaccaaggcagacatttctgcgcgggagcaaaccttgcgatgattttaatggaagcccaggatgataacttcatggaagtcgattttgtcatccgccgttttcagcagacgatgctgaacatcaaatacagcgctaaaccggttgtagcggcgccattcgggatgacactcggcggcggcacggaagtctgtctcccggcggcacgcgttcaggcggcgagcgaatcgtatatgggtctcgttgaaaccggcgtcggtcttattccgggcggcggaggaaacaaagagctgtacatgaattatctggacggcggaagtgaactcatggacgcagcgattaaaaccttcgaaacaatcgcgcttgccaaggtgtccggttcggcacacgaagcccgtgacatgaagattttgtccgcggcagaccgtatcagcatgaatcaggatcacctgctgcacgatgcgaaacagctggctgcttccttatatgacagcggataccgtccgcctgcccgcaaaaaagtgaaagtcaccggagaaaccggctgtgcggcattactgctcggagcagaccaaatgagacggtcgggttatttatccgatcacgatatgaagattgcgaagaagctggcccatgtcattgccggcggaagagtcccgttcggcacggaggtttcagaagaatatttactcgagattgaaagagaagcctttttaagcctcgctggcgaggcgaaatctcaagcgagaatgcagcatatgctcgtcaaaggcaaacctttacggaactaggagggtgtttatgagagaagcagtcattgtggccggtgcgagaaccccggtcggtaaagcgaaaaaaggatcgcttgcagccgttcgtcctgatgatttaggcgcgctttgtgtaaaagaaacgctgaaacgggcaggcggctatgaaggaaatatcgatgacttaattatcggatgtgcaacacctgaagccgaacaaggattaaatatggctcggaatatcggtgcgctggcggggcttcctcatacggtgccggccattacggtgaaccgctactgctcttccgggctccaatccatcgcttacggtgctgaaaaaattatgatcggcgcgggtgataccgtcattgcgggcggtgcggaatccatgtcgcaagttccgatgatggggcatgtgacacggccgaatatcgctttggcggagcatgcgcctgagtattacatgagcatggggcatacggcggagcaggtcgccgaaacgtacggagtatccagagaagaccaggatgcatttgcagtccgcagccatcagaatgccgcaaaagcccttaaggaagggaaattcaatgacgaaatcgtgccggttgaagtatcgctgacagaagtcggtgatgaccataagccgcggaaaaaacaatttaccttttctcaggatgaaggcgttcgtcccggcacgtcggctgacgtcttggcgaagctccgcccggctttttcaaaaacgggaaccgtgacggccgggaactcttcacaaacaagtgacggcgcggcggctgtcatgctgatggatcgcgaaaaagcatcgtcgcttggattggccccgcttgtcaaattccgttcctttgccgtaggcggcgttccgcctgaagtaatggggatcggtccgattgaagccattccgcgggcgctcaagcttgccggactcgaattacaggatatcgggctttttgaattgaatgaggcctttgcttcacaggccattcaagtgatcagatcgctcgggatagatgaagaaaaggtgaacgtcaacggaggcgccatcgcgctcggacatccgctcggctgcacggggacgaagctgaccctgtcactcattcatgaaatgaaacggagaaacgagcaattcggcgttgtgacgatgtgcatcggaggcggcatgggcgctgccggcgtatttgaactcatttaaaaaaagggggaaatgaacatgaaacaggaaacggtcaacgtcaaaaaaggcggcagctttctgattgaagagacgggatatgatcaaatattcactccggaggactttacagacgaacataaaatgatcggcaaaacgacagaagactatgtcgtaaacgatgtgcttccttatatcgatgaaattgaaaaccatcagtttgagcattcggtcagactgctgagaaaagccggagatctcggcctcctcggagcagacgtgcctgaagagtacggcggaatcggcctggataaaatcagttcagccttcattacggaaaagttttcacgtgccggcagcttttcgctatcttacggcgctcacgtcgggatcggttcattgccgatcgtgttcttcggaacggaagaacagaaaaaaacctatttgccggacttggcttcaggacaaagaatcgcggcatacgccttaactgagcccggttcaggttcagatgccctcggcgcgaaaacgacggctgttttgaatgaagcgggcacacactatattcttaacggagaaaagcaatggattacaaactccgcctttgcagatgtctttgtcgtctacgctaaagtggacggagataagttttccgcatttatcgtagaaaagaactatccgggcgtatcaacgggaccggaagagaaaaaaatggggattaagggttcatcgacaagaacgctgattttagatcaggcggaagtcccgaaagaaaatcttctcggcgaaatcggaaaaggccatgtcatcgcctttaatatcctgaatatcgggcgctacaagcttgccgtcggcacaatcggcgcttcaaaacgggtgattgagctgtctgccgcttatgcaaaccagcgccggcaatttaaaacgccgatctcaagcttcacgctcactcaggaaaagcttgcgacgatgtcagcgcggctttacgccatggagagctctgtatacagaacagtgggcttattcgaagataatatgagcagactgacggaagaggagcaaaaagacggacgcgaagtcgcgaagtccatcgccgagtacgcgattgaatgctcgctcaacaaaatgtgcggttctgaaacgcttgattacattgccgacgaaggggttcaaattcacggcggttacggatttatgcaggaatatgaagtggagcgcgcctatcgcgactcaagaatcaacaggatttttgaaggcacaaatgaaatcaaccgcctgatcgtaacgagcacgtttctgaaaaaagccgtaaaaggtcagctgccgctctttgaaaaagcaaaagcgctccaagaagaactcatgatgctgatgcctgaagagccgggctcagaacctcttgaacaggaaaaatacattgtcagacaggcgaaaaagatcgccctcttgacagcgggtctcgcggcgcagaaatacggcaaagagattgaaggcgagcaggaaatcatggtgaacattgccgatattgtcagcgcgctgtatgctttggaatctgccgtcctcagaacggaaaaagcaattgcggcggacggtgccgaaaaagccgcgcagaagctgttatatacggaaatctttgcccaggaagcccttcagaacattgaagcgcacgccaaagaatcactgatcgccatggaggaaggagattccctccgcatgatgctttccgtgctgcgcaaactgacgcgcctgacgccgaaaaacctcattcagaaaaaacgtgaagcggcagcagccgtcttccgtgaagaaaaatatacagtctgatcacatgctgaaagcgctccttcatcaggggcgctttttcatgaagcaacgttataggtttttacaagtgattgtgttaaaataacgacgatcatttacaaggggtgaagaagatgtcgttaaatttttactggtaccctaaatgcggaacgtgccgtaatgcgaaaaaatggctggaagaccgcggtaaggaaataaacgaaatacatatcgcggaggaaactccgtcgaaagaagaaattaaagacctctatgaaaagagcggtcttgagctcaaaaagtttttcaacacgagcggaatgaaataccgcgagctgaacttaaaggaaaaactgtaccatatgtcagaggatgaacagctcgaacttctggcatcagacggtatgctcctgaaacgcccgattacgacagacggcgaaaaagtcactgtcggctttaaagaagaccaattcgaaaaatattggatgtaatgccaggttcaaagaattatggtatcttcttattataagaaaaaaatggagggatttagatgagcacaccgaaagatatgcgttattccaaagagcacgaatgggtcaaagttgaggacggaaaagcccgtatcgggattacacatttcgcgcaagccgaacttggcgacatcgtatttgtcgagcttccggaagtcggcgccgaaattaaagcggacgagccattcggcagcgtggaatccgtcaaaaccgtatccgaactgtacgcaccgattaacggaacggtgacggaagtgaacgaagaccttgatgacagtcctgaattcgtaaacgagtctccgtatgaaaaagcgtggatgatcgtcgtggaaccggctgatgctgaagaaatcgaaaacctcatgacttctgagcaatatgacgaaatgacacaggaagactgatcggatagcaaaggggccatttggacactctatctgtaacgggaggtgtctaaaatggcttttgataaacaaaaggtcgatgtgacggagaacgtcacgggccgctttcaaaacggccggttttccttgtttcatgaaaatgaagccatcggcgagatgacaggcatggaccagtacgagctcaaacagggcttttcatttgaaaatcaaaaattttataaaacagccgatgtcataaacggcagcgatccgaaatatgtcgattgcgattatgagaatggctggtgttaacagttggcggtgaatttcactgccttctttttcaatctgacgctaaaacaatcggcaggtgacgcgcttatgtacaacggagatgaaaaggtcattatcgtagaaggaaaatctgataaaatcaaagtcagggaagtgctcatcgaacccgcggaaatcgtctgtacaaacgggacgatcggccaaaccgaactggaagagttggcggaccgcctgtttgacagagacgtctatattttaacggacgcagatgactccggagaaaaattaagaaaacagctgaaacgggagcttcccgaagcgcgccatatttatatagacagaacatacaggcaagtcgagtcgtgcccgggccatcatctcgcatctgtgctgatcagagccggctttgatgctgacactgtatttttgaaaaagaacgacctgaggtggtaatcatgaaagaactccaagaaaatgaactcgaatcgattcaggatgacgtttatctcctgtatttgtacaccccgttttgcggcacatgccagctggcgtccaaaatgcttactgtcgtcgaagaaatgctgcccggtgccgccttctataaaaacaacgtgaattattcccccgcattcgccaaagcctatcagattgaaagcgttccgtgctttttgctgtttaaaggcggagagcttgttgagaaaggatacgccttccgctccgtttcctatttatatgagctgattaaacaaaaaacatcgcaaacgttcccgatgtgacaatatttacaggaaaatgtcgtgcggtttataaagggttctgtccgttaaaaagagaaagtgtatgtatggccattaaaacgggaggttatacgagtggagaaaatagaagtttcagagaatgacggacagcatctgtttttgaaaccgctattaaacgcctcaacgctgctgattacattccaaggagaaacagaagccttaacggtctcaattaacggacagggagaaatgagaaaaacgtcggcttcaaaggagaaatctaatttgaccttttacggaaaccagacggaaatcatccatctcctgcatggtgatgtctctttgcaaaagcttatccaaagcggaaaactcaaagtgaaaggatcattcagagccctgctgaagctggaggccatcctctggctgacaaacggattttttcaggcgatcagtaaacggccgtaactgccaatctactatgtgacaatagcttccaatatttattttattgactttttatcattcgccgtgctattctacagtaagaatttccggacgaaaatacgatatgttttctcttatcaagagaggtggagggaagtgccctatgaagcccggcaaccatcaacaatgttgaaatggtgccaattcactcaaagcggtctgctttgaaagatgagagaaaggcctttttcaataagcctttctgctcatttttgcagaaaggcttttcttttgcggagaaacccggaagatttcttagaatagtgtaaggcgggtgattgctttgatccatcttcaaaatgtttcaaaaatttacaaagcgaagcatggggatgtcaatgctgtccaagatgtcactcttgatatcaaaaagggcgaaatatttggaattataggatatagcggagctggtaaaagttccttaatccgtctcctgaacggccttgaaaagccgacgtcgggaaccgtggaagtcgcggggacggaattaaataaagtaagcagccgcgggctgagaaaagcgcgccaggaaatcagcatgatcttccagcattttaaccttttgtggtcgcgcaccgtccgggagaacattatgttcccgctggaaatcgccggcgtgaaaaaaagcgaacgggtccgccgcgctgatgaattgattaaactggtcggattagaggggaaagaaaaatcttatccgtcgcagctgagcggcggtcaaaagcagcgtgtcggcatcgcccgggcgctcgccaataatccgaaagtccttctgtgcgatgaagcgacatcagcgctcgatccgcagacgaccgattcaattttggatcttttatccgatataaatgacagactcggtctgacgatcgtgctcattacccatgaaatgcacgtcatccgaaaaatctgcaacagagtcgccgtcatggaaaacgggaaagtcgttgaagaaggcgaagtactccaagttttcagaaacccgcgcgaaccgatgaccaagcgtttcgttcagcaggtgacagaaccggaggagacgaaagaaaccatccagcattttctgcaggaaacagcgacagggaaaacgattcagctttcatttgtcgggcaggccgccgagcagcccctcattacggaaatgatccgaaactttgatgtggacgtcaatattctgcaggggaaaatttcacagacgaaggacggagcttacggttcattattcattcatattgacggtcaggaaaaagaagtagaaaacgtgatccggttcatcaaagacaaacaggtagaagcagaggtgatcacaaatgtttgaaaaatggttcccgaacgttgatataaccgagctgtggacggccacatatgagaccctttatatgacggtcatcgctttagttttttcatttatcatcggagcgattctcggtcttctgctctttttaacgggcaagggaagcttatgggaaaataaaatcattaacaccgtgattgcggcggtcgttaatattttcaggtctattccgtttcttattttaattattctgcttctcggctttactaagattctggtcggatcgattttaggaccgaatgccgcattgccggcgctgattatcggctccgcgccgttttacgcccgtcttgcggaaattgcgctccgggaagtcgataaaggagtcatcgaagctgccagatcaatgggagcaaagacatcgacgattatcttcaaagtgctgattcctgaatcaatgcctgcgttaatttcaggcatcaccgtgacggccatcgccctgatcggatctaccgccattgccggcgccatcggttcaggcggactcggaaaccttgcatatgtagaaggctaccagtccaataatacggatgtaacgtttgtagcgacagtatttatactcatcatcgtctttatcattcagattatcggtgatgtaattacaaatataatagacaaaagataagggaggatttacattgaaaaagattgtattaagtgcgctgctgcttgtgttcgcgggagttttagccgcctgcggatcaaacggctcgaataaaaaggaaatcgttgtcgccgcgacaaaaacaccgcatgctgaaatcttaaaagaagcggaaccgctcttgaaggaaaaaggctacacattaaaagtaaaagtgctgaacgattacaaaatgtacaacaaagcgttagctgataatgaagtggatgcgaactacttccagcacgttccttaccttgaacaggaaatgaaagaaaataaagattacaaactcgtgaatgccggagccgttcaccttgagccgttcggagtttacacgaaaaaatacaaatcactgaaagacctgcctaaaggcgcgaccatcatcatgactaacaatgtcgctgaacaaggccgtatgctggcgatgcttgaaaaagccggactgatcacacttgatccgaaggtaaaaacgattgaagcgactacgaaaaacattacgaaaaacccgaaaaacctgacattcaaaaaaatcgcccctgaattaacggcgaaagcatataatgaagaagaaggcgatgcagtcttcattaacgtcaactatgcgattcaaaacaaactgaatccgttaaaagatgcgattcaagtggaatcaacgaaaaacaacccgtacgcaaacatcatcgccgtacgcaaaggtgacgaaaaatcagagaaaatcaaagcgcttatggaagtccttcactctaagaaaatcaaagactttattgagaaaaaatacgacggagccgtgcttcccgtatctgaataaagcgaaaaccccggatgaatcatccggggtttttttcgggtattaatcggagaactgtccataataaaaaggaaggttaacgattggagggaatggcagtggctcaataccaggataacggaaaaagcgtgcatgacgcattgaaacaatataaagaaggtttaggcatattcgagcaaaaaatgcccatgatggggcggaagtttaatgaatttactgagcagtgtttctcagcggattcattaactgaaaaagagaaacaattaatcgctctgggcatcagcatcagcgctcaagatgaattttgcatgatttatcatacgaagggctgccttgaccaaggggccacagaagaaaacatccttgaggtcatcagcgtcgcggcggcattcgggggcggcgcggctctcagtcagggagtgaccctcgtgcagcagtgtattcaggaattcggacatacgacgcattagaatgagcaatcgtgtgaataccgtttttcagataaagcgagcgccggtttccggcacattcgaaaggattcaggggcacaccctctttggccggagcagcggatcattgttacaatagaaacaaatatatgaagggattgattcattatctgcaccagccacgagagactggaccttgactatacgcctgaaatggaaaaagcgatgcagaagtcacacggcatcggctacgaggaatacggacggcgtctttcaaaaaggatggaagtcgaacggcagagggagcttgaatatcaaaaaagcaagttcctcgcagcgcagcttaatgagaaaatcggtcagtaaaaaagggtggatttccgccctttttctgtttcaaacagctttaattacgccttgatctttgataaactttaggaatgttccgggtaatataaaaagttgtatttacttttcatttgttataaaattagaatgagaataaattgagaataatgattatatattttggaggtatagatatggctgcttcaacattaacgatcaaggatcttcacgttgaaatcgaaggaaaagagatcttaaaaggtgtaaaccttgaaataaaaggcggcgaattccacgctgtcatggggccgaacggtaccggtaaatccacgctctcagcagcgattatgggacacccgaaatacgaagttacaaaaggaagcatcacgcttgacggcaaagatgtactggaaatggaagtggacgagcgcgctcaggcgggtcttttccttgcgatgcagtacccaagcgaaatcagcggtgtgacaaatgccgatttccttcgctctgcgattaacgcacgccgtgaagaaggcgatgaaatttctcttatgaaattcatccgcaaaatggacgaaaacatggagttccttgaaatggaccctgaaatggcgcagcgttacctgaacgaaggtttctcaggcggggagaaaaaacgcaacgaaatccttcagcttatgatgatcgagccgaaaatcgccattcttgacgagatcgattcaggtcttgatatcgatgcgcttaaagtcgtttctaaaggaatcaacaaaatgcgcagcgaaaacttcggctgcttaatgatcactcactaccagcgccttctgaactacatcacgcctgatgtcgttcacgttatgatgcaaggacgcgtagtgaaatccggcggcgcggagcttgcacagcgccttgaagcggaaggttatgactggattaaacaggaactaggcattgaagacgaaactgtaggccaagaagcgtaagcgttagggggataatcatgacattggaaacgaaactatccgtagatcaggaatatgtcaaaggcttttccgaaaagcatcaagaacctgcctggctgaaaaacctgcgcttacaggctcttgaaaaagctgaagatctgccgctgcctaagcctgataaaacaaaaatcacaaattggaactttacaaagttcaacaagcatacagtagaaaacgcgccgcttgcttctttagaagatttagctgatgaagcaaaagcgctgatcgatatcgaaaacgaagataaaacgttatatgtgcagcgtgatcaaacgcctgctttcctttctctttcaaaagaactgaaagacaaaggcgttattttcacggacatcttaacggctgcccgtgagcacagcgacctcgttgagaaatacttcatgaaagacggcgtaaaggtcgacgagcataaactgactgcgcttcatgcggcattaatgaacggcggggcattcctttatgttcctaaaaacgttcaggtggagacgcctgttcaggccgtttacgttcatgaaagcaatgacacggcattgttcaaccacgtgctgatcgtcgctgaagaccacagctccgtcacttacgttgagaactacatcagcacggtgaatccgaaagaagcggtattcaacattatcagtgaagtggtcacaggtgataatgccagcgtgacgtacggcgccgttgacaacctgtcagcaggtgtcacaacatacgtcaaccgccgcggagccgcgcgcggacgagacagcaaaatcgagtgggcgctcggactgatgaacgacggcgacacgatttctgaaaacacgacaaacctctacggagacggcacatacggcgatacgaaaaccgtagttgtcggaagaggagaacagacggaaaactttacgacgcagatcatccacttcggtaaggcttctgaaggctatatcctgaagcacggagtcatgaaagatgccgcatcttccatctttaacggaatcggcaaaatcgagcacggcgcgtctaaagcaaacgctgaacaggaatcccgcgtcctgatgctgagtgaaaaagcacgcggagatgcaaacccgattctcttaattgatgaagacgatgtaactgcaggacatgcggcatctgtcggccgtgtggatccgatccagctttactacttaatgagccgcggaattccgaaagaagaagcggagcgcttagtcatttacggattccttgctccggtggtaaaagagcttccgattgaaggagttaagaaacagctcgtctccgtcatcgaaaggaaagtaaaataatgaatatcaccgatattcgtgaacagttcccgatccttcatcagcaagtgaacggacatgacctcgtgtaccttgacagcgcggcgacttcccagaagccgcgtgctgtcattgaagcagtggatcagtattacagcaaatacaattccaatgtccacagaggcgttcatactcttggcacgagagcgacagacggctatgaaggtgcgcgtgaaaaagtccgtaagtttatcaatgcgaagtcaatggctgaggtcattttcacaaaaggcacgacaacttcactgaatatggtggcgctgagctatgcccgcgccagcttaaaacccggtgatgaagtggtcatcacccaaatggagcatcatgcgaatatcattccgtggcagcaggcagtaaaagcaaccggcgcgactttaaaatatatcccgatgcaggaagacggcacgctttcgctggacgacgtccggcagactgtcacaagccatacgaagatcgtggcagtcgctcatgtgtcaaacgtgctcggcacgattaacccgattaaagagatcgccaaaatcgctcatgacaatggcgctgtcatcgtggtggacggggcgcagagcacaccgcacatgaaaattgacgttcaggacctggattgcgacttcttcgcgctttcttcccataaaatgtgcggcccgacgggaatcggcgtgctgtacggcaagaaagaactgcttgagaatatggaaccggccgaatttggcggcgaaatgatcgactttgtagggctttatgaatcaacttggaaagagcttccgtggaaatttgaagcaggcacgccgattatcgcaggcgcgatcggattgggagccgcgattgattttcttgaagagatcggactcgacgagatttcccggcatgagcataagcttgcagcctatgcgcttgaccgtttcgagcagctggacggcgtgacggtatacggtccgaaagagcgggcgggacttgtgacatttaatcttgatgaggttcaccctcatgatgtcgcgactgtcctcgatgctgagggcattgcggtcagagccggccatcattgcgcccagccgctcatgaaatggctggatgtatctgctactgcgagagcgagtttttatctgtataatacagaggaagagatcgataagctcgcggaagccctccaaaagacaaaggagtactttacaaatgtcttttaatgcaaatttagatacattatacagacaagtgatcatggatcattacaaaaatccgcgcaacaaaggggttttggatgacagcatcgtcgtcgatatgaacaacccgacttgcggcgaccggatcagactgacaatgaagcttgacggcgataccgttcaggaagcgaagtttgaaggggaaggctgttccatctccatggcttcagcttccatgatgacgcaggccattaaaggaaaagatattgataccgccctttccatgtctaagattttctcagacatgatgcaagggaaagagtatgacgactcaatagatctcggggatattgaagcccttcaaggcgtttcgaaattcccggcccggattaaatgtgccaccctttcatggaaagcacttgaaaaaggagtcgctggcgaaaaaggcggcaattaaaagattggagtgaaaatggatggctaaaaaaatgcctgaaattggtgaatacaagtacggttttcacgataaggacgtttccattttccgttcagagcgcggattgacaaaagaaatcgtagaagaaatttcacgcatgaaagaagagcctcaatggatgcttgatttccgcctgaaatctcttgagcatttctacaacatgccgatgccgcagtggggcggggatttaaactctttaaactttgacgaaattacgtattacgtaaagccgtctgagcgttcagagcgttcttgggatgaagtgcctgaggaaattaaacagacatttgacaaactcggtattcctgaagctgagcaaaaataccttgccggtgtttctgcacagtacgaatccgaagttgtgtaccacaatatgaaagaagatcttgaagcgcaaggcattgtcttcaaagacacagacagcgcgctgaaagaaaatgaagacattttccgcgagcactgggcgaaagtcattccgccgactgataacaagtttgcggcgctgaactcagctgtttggtccggcggatctttcatctacgtgcctaaaggcgtgaaggttgaaacaccgcttcaagcttacttccgcatcaactctgaaaacatgggtcagttcgaacgtacgctgatcatcgttgacgaagaagcaagcgttcattacgtagagggctgtacggctcctgtgtacacaacaaactcgcttcacagcgcggttgttgaaatcatcgtcaaaaaaggcggctactgccgttatacaacaattcaaaactgggcgaacaacgtttacaacttagtaacgaaacgtacggtttgtgaagaaaacgcgacgatggaatgggttgacggaaacatcggttctaaattaacgatgaaatatccggctgtcattctgaaaggtgaaggcgcgcgcggcatgacgctctctatcgctcttgcgggcaaaggacagcatcaggacgcaggtgcgaaaatgattcaccttgcaccgaatacgtcatccacaatcgtatcaaaatcgatttcgaaacagggcggaaaagtaacataccgcggtatcgtccacttcggacggaaagcggacggcgcccgttcaaacatcgagtgtgatacgctcattatggataataaatcaacttctgatacaatcccttacaatgaaatcctgaacgacaacatttcattggagcacgaagcgaaagtatcaaaagtttctgaagaacagcttttctacttgatgagccgcggtatttctgaagaagaagcaacagaaatgatcgttatgggcttcatcgagccattcacaaaagaacttccgatggaatacgcagttgaaatgaaccgtttgatcaagttcgaaatggaaggctccatcggttaatagtaaaaccccgccatatggcggggtttttttgtttattgaatagtgaaatttccgtattcgcttgaccggacatgaatcggcccgtttaaattgtagttcttctctttgacaatatcgcggaaaacgtcgacacgggcaaccgattctctccattcatcctgggtgtcctcatctgccggattcatcagatcgtcatagcgtacatccaagaatttattgagccatttcttctcgtccgttccgtctttcggtgacccgcccatttttttgttcgtgcgtttaatcagggcataaaaggagtctggatcatcaccgtcaccatgctgaatcaccgtatcgtacatcaccgctttggccaaggccgttttcagtccggcattttctgaacgtttcatcgccggctgataatacaagctgtcgtttaccttatcctgggcagcgcggaaggctttatcattgccaagtgagcgccaggcagaagcgaatcctttcagattgctgatgtcatcgctttcgtccttcgcaagacgacgcaattcaggcaaatactttttcaatttgttattcggcaccgctttcgtatatacttcgactacttccagcgcatctccggtagccgtcgtaaagccggcccgcccgcaagtgtaacctcttccgtcatccaacgcttcaacatatccgtattggatttccgtctttccgttttcaaaaatgctggtcagctgttccgcacggcgcttctgatccttattcagcccggccgcaaaaaccgtaccgctcatcatcagggtaaaaaacatggtgaaaataagagatgaaaccgccgtcttcttccaaaaacctgcttttttcttcaaattgattttcattgccatacccctttcatatgtaagttacgcactcagtatacatgagggggtgatttttttgttgaaaacacacgaatttgtcaatattttgaatcctaagccctatccagcgcttcataaaaagaacgcaccaccttcaccagacagacaatcccgttctcgcatcattcttatctgtaacatagtcaacgcggtgaaacccgcattgtacagcctgctgaaaaagggcttcgagcatgtccggatctttgcaatataacgttacatacgagcaatctgcgatgagaagcacaagttcacaggaactatccaaatattctcatacgtattgatttccgttaccatcccgctcgggaaagctttcaattcagcacacaacatttcaggcagaaaagagagggaacgggcgatcacggaaatggtgagggtgctgaagcctggcggcacattggccgtgtcagatataaaaaatacatcacaatacagagcaattcttgaggaaaacggctttcagacaagaacgtattccttttattatacgtttccgttttcgaaacttatcattgccgtcaggactccggtaggaaccgggcgctctatttgttaaaataaataagacaaaacagatagaaaaggtgttacacatgaagtcttatatgattatcggagccggcattctcggtgcgtccgcggcttatcatctcgcaaaggccggtgcggatgtaacggtctttgacaggaaacacccggggcaggcgactgacgccgctgcagggatcgtctgcccgtggctgtcgcagcgccgcaaccaggcatggtatgcgatcgcaaaaggcggagcccgctattataaccaattgatacagcagcttgaagctgacggagaaacggacaccggctatcaaaaggtcggtgccgtcagtctccatacggatgaaaaaaagctcagccaaatggaggaaagagcttataaaagaagagaggacgctcctgaaatcggtgacattacgagactgactccggcagaaacgaaggcgctgttccccgcgctgtcggaggaatacggggcggttcatgtcagcggcgcggcccgggtgaacgggagggcgcttcgtaaggcgctgttaaacgcggccgttaatcacggcgcggctgtttacaatgaagaagcgtcaatattgacagaggacggtgccgttatcggtgtgaaaaccgcagaacgcacgcttactgccggccaggttctcgtaacggccggcgcttgggcgagagagctgcttgaaccgctcggcatccgtttttcagtatcataccaaaaggcacagatcgttcatttagagcttcagggagaggatacgggcggctggcccgtcgtcatgcccccaaacgatcaatacattctcgcctttgacagcggcagaatcatagcgggcgcgactcatgaaaacgataccggcatggatttgcgggtgacggccggcggcctccgcgagatttttgacaaagcattaactgtggcgccggggctttcagacagtactgtgatagagacaagagtcggtttcaggccgtttactcccggttttcttcccgtcatcggcaaagtgccgaatatcagcggactcctcgttgccaacgggctgggcgcctcagggctgacgagcgggccgtatctgggggcggaactggcgaaactcgcactcggccagcagacggaaattgatttgagcctttatgatccggccggggcgcttgaataaaaaatagcttttggcgcattcttatgataggatggagctttaatgaataagaggacgtgacccattttgataaaaataaaccttcctgctcctgatgtaacgattacggaacggcagcagtcaccgtcggaaaatgaaccggcgattaaagcgatttacggtttcattgattttcaccgcattccgagagacaaaggcggcatctttatgttttataacattcatgatgaactgctgtttgtcgggaaagcccgtaaattaagacaaagaatcaaaaagcattttgaagacaatgtgtcgcctgttaaacatcacagggacgaagtgtataaaattgaagtatgtgtcgtcaatgatccgatggaaagggagatttacgaaacgtacgcgatcaatacccttcagtcgaaatacaacattgagaaagtattttataaataagaaaaaccggagcttaagggctccggttttctttatgtttacagtgccagccacatcactgcaatatgcacgatcagcagacagtaaacgacgaggaacagctgaacgaccttttttctgaataacatgcagatcatcatgagcacaggaaaaatcaggacgccggccgttttattgattgatgtattcggacggttcgacacgtcatagtgaatggccatatcagcaggaagaaacggataaaacacaatcgacagaataaaggcgagaaccacagctccccacagcaccttatcattcatcaaaaacatatgaacactcccttttttacctataatagtattttagtgtgaaaaagttcatttttcagtatttatttgatggctgtgtgctgtatgggtatttttaaacgcggcggccgccattgagacgatcgctcttgcggtagcggccatcattttgacagtagcaagcgttgacgaagattccgatttaggaaaagagcagctcatcgctaatgtcgttgaccgcattaacgcacagcactgaggatgaagaaagaaaacgctaaggagacgagccttagcgtttttttgattgaagcatctgttttaaatatgcttctgaatcaaagccgagttcctcgtcggcttcttttttcagttcaagctgaagtcgcacatacgtgtcatatttcgggctgagcttttgaagtagattgctgaaaggcgatccttccttcagcgcgggcagatcagaagcggattctccgatcttgatcaggctttctctgtactcttcatctgtctccactcttttcacaagctgaatgatgatgtttttatgagtgtcccaagtggcggggtctctctccaaaatccgctcgataaattggtcatgctggactttgtgctgttggagctgagccgggtcctccttaccgaccagctgcatcatcgggtgtgcagccggaacttcttccatatcatccaatactttaataagctttgcccatatcgtttttttctcatctgtatcaatagaaaagtcgaggaacggttcaaacagcgcggcgataaattctccgaaatctcccgggaacagttttttcagctgaagtcccatatacttcggttcatctattttgacctcgccgatatcatgcagaattgaatcgacattttccgcatcttccacgcgcttgatcagcatttcagtcagtttccgttcctgctcaagctcttcaatctgccggctgagcttttgatgctgctggcgcagtatatcatgcagactgctgccctctaagaggaacgctttaatatcgcttacagacagtgccagcattcggagggcggcaatcattttcagcgtattcacgttctgagcggaatactcacggtatccgttatcagggtttttgctgacggtgattaaaccttcctgctcataatatttgatggcttttttcgtgagacccgtctgcctggcggcttcttttatattcattctgaatcactccctgcttttcattctaaacgtgtctctaagggtcaggtcaagaaagggcgggaaattagacgggtttattctatattttagaaatttcagaaaatatgattgacaacgcacctttgttgcgattaatataacgttatataatgttatataacattatataataaaacactgaggagtgaaggatttgagtcaaactgccgcacaagtgaatcacaaggttcaggctttcttggatgatctgaaaggaaaaacgattgaccacgtctttttcgtcgcttgcgggggttcttcagccattatgtatccgagcaagtacgtgtttgacagagaggcgaaagccatcagctctgatctctacagttcaaatgaatttattcagcgcaatcccattcagctcggagagaactctctggtgattttatgttctcagtcaggcaatacgccggaaacggtgaaagccgccggtttcgccagaaaaaaaggcgcgcttacgattgcaatgacctttgagcctgattcgccgttagcgaaagaagccgaatatgtcgcggtgtatgactggggtgagaacgcacaggcgataaatacgaattacggggttctgtatcaaatcgtgttcggcgctttacacgtgctggaaaaccatcccgcgtttgagcaggcgatcgacggactcaataaactccagaccgtatatgacaaagcgcttaaacaagaagcggatcacgcaaaggcattcgcgaaagcccacgaaaaagaagatatcatttacacgatggcaagcggtgcgaactacggcgtcgcttactcctacagcatctgcattctcatggaaatgcaatggattcattctcacgccattcatgccggagaatattttcacggaccgttcgaaatcattgatgaatctgttccatttattatcctgctcggcttagacgaaacaagaccccttgaagagcgggcgctttccttctcaaaaagatacggcaaaaaactgactgtgcttgatgcggcagcatatgatttttccggaattgacgattctgtaaaaggctacctggctcctctcgtattaaaccgggtgctcagaagctatgcggatgcgctggcggaagcaaggaaccatccgttaagccagcggcgttacatgtggaaagtcgaatattaagaacgcgcattatatttcaccggactataatgatatataacgttatagtccggtgacaaaggaggaaaagcatctgaaaaagctcatctgcctgttcgttctgttagctgtatgtctgtcagccgccgcctgttcaagccaaagcagttcctctgacggaaaagtgaccctgaagttttttcacaggtggccgaaggagccggaaaaaagctattttgaagaagcggtcaaagattttgaagccgctcatccggatattcatatccaaacggaagcggtcttaaacgattcttataaagacaaggtgaaagtcatgctcggaacaacgagcccccctgatattttcttttcatggagcgaccggtttgcttataaattcatcaaaggagataaagccctcgatctgtcgtcttactatcagcaggataaagattggtcctcacagcttgtgcagtcacaaatcaaaccctttacgcatgacggaaaacagtacggtgttccgtggcaaatggacgctaaatcattcttttataataaagacatttttaatacattacatttgaagcccccggcgacatgggatgaactgatcacagtctgtgagaaattgaaagagaacggatatattccgatcagtttcggcacaaaagcgccttggaccatttctcattatatcgggacgctgaaccagcgtatggtggatgaaaaaacgcgggcgaaggattacagcccggaaaccggggagtttacggacgaaggctatgtcaaagcgcttgaaaagcttcaggaacttctgccgtactttacaaagcacgtgaactccgttgatcacgaatacgtgcgccagcagtttacgagcggcaaagcggcgatgatttatgcggaaacggcagaaattaagctcgtcgaaccggtcaatctgggcttgtttcctttcccgaaaatcagcggcgaaaagggatctccccgtgcactgaccggatctcccgaaggatttatgatttcctcaaaaacgaagcacccgaaagaagccatggaatttcttcagtttttaacctcgaaaaaaatgggagagaagctgataaaagacgtcggtaaatacagcgcggttcagggaacggcgacagaaaacaattccaccccgatccagcgcgaagccgtgcaggatatcgtccgcgccgaaacaatggtgccgtggtttgatatggatgttgacgttgaaatcgccgatgtgtatgcggcaggcgttcagcagatgctcggcggcacaatgacaccgcgcgaggtgatgaattccgtgcagaaagcggcgcgtcaggtcaaagcgtcatctgaatagaacagatttctttggagaaaggagatgaggatttctttggtcagccgaaagcgtttcattccgtatctgtttctcgcgcccgcgctggtttttctgctgttcgtttacattccgattattgagaatgtgtttttcagtctgtttgaatggagctcatttcaacccgaaaagacgtttatcggtttgaaaaattatattgacctgttccacgatcccgtgttttttacagcactccgcaacaatgtgctgtatgcggtcatatcgctgatttgccaggttggcggcgggttaattctggcggccgtgctggaagacagattggtaagaaaatggtcgccgtttttccgtacggtattttttcttccggtcgtcatttccatgaccgtcattgcgctgttgtttgattttatttataacccggaaatcgggcttttgaatcagctgctggaagccgtcggacttgatgaactgacccgggcgtggctgggcgatgaaaacaccgctatgctgtctgtcatttttgtgtctcaatggcagtctgtcggttacatcgccatgctgtacattgtctcgattcagagcattcccgctgaattatatgaatcggcgcagctggacggagccggaaaaatccagcagttttttcacattacggtgccgcagacgaaagaaatgtcgtttgttgccgtggtgatgacgctgaccggcgcatttaccgtatttaatgaaccgtatattctgaccggcggagggccgggcaatgcttcagaagtgctgagcacatttttgtataagagcgcttttacaaaggatatgatgggctacgcttctgcgatcgcgacggtggtgcttttgctgacgcttgctctgtcgcttattcagatgaaattctttaagaccggaaaggaggagtaggccgatgcttcctgaaaagacggacttgcgtcatgcccgtcaggccgtcagaacaggcggaaaaccgagaaaatggtatgtcggggaaacgtctgtgtggctgtttctctttatctacctcattgccgttgcttatccgctgttatggatggcggtcagcgcctttaaaagctcggatgagatttttgagcacagctggtcgctgccctctgtctggcatcccgaaaacttcgtatccgcatggaaccaagggatttccgcttattttatgaacagcgtcattgtgaccgtgctgacttgtctcatcaccgtatttgtgagtgcctgggcggcatacgggctggcccgttttcaatttaaaggaaaagggtttgtgctgatcatttgtcttggcggcttgatgctgacgccgcaggtcagtcttgtgccgctgtactccattatccagtcattgggactgtacaatacgtattgggcattgattcttccgtacgcagcctatcgtattccgtttaccgtgattctgatccgttcctattttttgtcgatttccaaagagcttgaggaagcggcctatctggatggatgtacaagtttcggaatatttttcagaatattcttacctatgagcgtgccgattctggtgacatcaggcattttgacggcttaccatacatggaatgagtttatgtttgcgattatttttatcgatgatgaaaatttacggacgattccggccgggctgatgcagttcagagatgcgctgcagacggattggggcgtgctgctggccgggctgacgatttctgctgctcctattatcgcgctgtttttattaatgcagagatattttatccgcggcattgcagcgggaagcgtgaaaggataagggggatgaaaagatgaaactgatagcggccggagataatgtagtagattattatcaggatcaggagacgttttacccgggcggaaatgcgttaaatgtagccgtgcttgcccggcgcttaggccacgaaacttcttatatcgggattctcggcagtgatgaagcggcggatcacgtattgaatgtgctgaaactggagaaggtgaatgccgatctgatccgccgggcatacggagaaaacgggatggcggtcgtcacgcttgatgaaagaggggacaggatatttgccggatcaaataaaggcggcgtgcaatcgcgtctgacgctcgcttttcaggagaatgacatctcatttatcgccggacatgatctgctgcatacgagcgtatacagcaggatagaacgtgaccttccgatgctgagcggccatgtgccgatttcctttgatttctctgtaaaacgtgacgaagcctatttagaagcggtctgtccgtatgtgacgtatgcgtttttttccgggagtgatttgagtgaaagtgaatgtgtgcggcttgccgaaaaagcccgcggtttcggagcgaaaatcgtttgtctgacaaggggagaacatggcgcggtgttatcggatggggaacgcgtctatcatcagccggtggtaagagctgatataatagatacattgggggcgggtgattcttttatcgccgggtttcttaccgatttcttcgaacatcaggatattcggcgagcgcttactgcggccgccgggacggctgccaaaacatgcggggggttcggagcgttcggttacgggcatccctacaggccggacggcgggaaaagcagtgaaaaaacgagaatacgataagcattgtctcgttttttatacttgttacgcataggggctgttaatggtaaacgtgacgcggtcggtatgcattaaaaacagcgaactgtatatcggctgttcttttgacataaaagcggttttgtcaatttcaaaaagcgcatccccgatatcacaagccagatagcggctttcttcctgcttggcgtatacgacatttaacagtttcgtattatgggtgggcaccacctgatagtgctgtttcaaaatgtcatgcatcgacacgccgcctttaatatgcttgccgatgtcgggaaataaactgagcggatagtgggcgatttcgaatgagagcggctggtcgtcgtgaaataaaatgcgttttaattcaagaacgggactttcggaagcgacgcgaagtttttgagcgatggatttaggcgcttcaatgatttcatgggaaaggatctggtgtttcggtttttttcccgttgattccataaattcagagtagccgttgaccgcgatgagctcccgcttcagtttagggcttttaacgaacgttccctttccctgctgccggacgagccagccttcttccacaagatcaaggatggccttcctgactgttatgcggctgacgttgtacgtttcgcacagctcattttcagtcggcagttttacggacggcgaataaacgcccttcttgatatcgtccgcgataatttgtttcagctgaatatataaaggtttcgagctcccgttatttaacaatgggacggacctcctttgtcaagtagtagtactattatatgtattatgatgttataatacaaatttgcctttcatttatgaatctgtcagaaaccccgaacatttttaacataacagaaagatgtggcggtttccagtattggaggaggtttcgaatggcatcattaacatttgaccatatcaaaaaaacatacggcgcccaatcggcggcagtgaaggattttcacttagatgtaaaggatgaggagctgctggtgcttgtcggtccctccggctgcggcaaatctacgacactcagaatgattgccggactggagagcatttctgaagggaagctttatatcgatggagacgcggtgaacgatctgcccccgaaggatcgtgatatcgcaatggtttttcagaattacgcgctgtatccccacatgacggtgtttgataatatggcgttcggtttgaagctcagaaagctgccgaaaaaagaaatcgcagagcgagtccggacggccgctgatattttggaaatcgggcatctgctcaagcggaaaccgaaggctctttcaggcggacagcggcagcgggttgcgctcggccggtcgatcgtgcgggagccgaaagtgtttctgatggacgagccgctttccaacttagatgcgaaactgcgtgtgacgatgcgcgccgaaatcagcaagctccatcagcgtttgaaagcgaccatcgtttatgtgacgcatgatcagacggaagcgatgacaatgggtgaccggattgtcgtcatgaatgaaggaaatattcagcaggccgcaagcccccatgagatttatcattatccggcgaatatgtttgtggcgggttttatcggttctccgagtatgaattttataaaaggcgtcatagaagaaagtcacgggcaatggtattttgccggttcgtccgttcgtctgcccattccgaaagaaaaagcggccgttcttgtgcagaaaggatacagcggtcaggagatgactgcggggctgcgtccggagcatttgacgcttgccggacaatcagagcacccgcctgaagcggtgtgccgcgctgtggcggaagtatgtgagaacttaggcgcggagatgtacgttcatgcggtgagcggagatgaccgcatgacgatccgccttgacggcgcttcagaggtgaaacccggcgatgccattctgcttgcggtcaatatgaaccgggccgtgttttttgatgccgacactgaaaacgccgtatattgaaaaagggagcctgatgatggggctcccttatcacttcttatgatacgattaccagatttcgtccgcccattccgggtggtcgataaacggattgcggttatgctgatagtcttcgtaaatgatttcgttccgccgtttttccttactgtcgacggggtcttgtttattccatttgagcaaaacggacagttttcccatgtaaggagctgagccgtttccggttttatcattcagctcaaggtcgggatacccgtcgccgccttcataacgcaccgccatgtaaaacagcatgcgggcgacgtctcctttgacctcatcgcgcggctcccaggaatcaccgtcataataattgcccggcgctttcgggtattctgagccgccgttatcaaaatccatgtttcctctggcgctgttcacctggacgtctgcagggcgcagatgatgaatgtccgtcccggggccggcagctgttccgaagtttccgtgtgactttgcccacacgtgttcacggttccagtccccgacgctgccgccgtttttacttttggcccgtgattcctgggtgtagagcaagatgacattgttcgggtttgccggatcttcgtcagtttccttcaatgcattccatacttggctgtaagacagctttgtatgtccgctgatgatgcggtgcagggcgctctttaaggctgttccgctttttccggaagcttctttgtaatatgtctccgtatccgcagacggagtgatgacagctgaggaagtttgcggaaaaagagttgtgccgccggcagttgaaaccgccagccggctgtacagattcgtgtcagccggcgcgcccgcagaggctgacggcgcggtccaacccaaaatgaaaaacaggcagacaatcggcagaaaccaaagtttttttgtcatgacttgccctcctttacctctattatccaaaaaataaatctaatattctatcttttttgaaaaatggttccttcggcttatgggacagaggggcggtttcttggtcaaagtatccggaaaatcattgattttttggaagatatgataatgaactcgttatgcgctccttctataatgaagatcatcttgtcagtttttcagtttaaaaggagggcatatatggaacatcagcagctttcggcggcgaatatcgggatttccgatgacatacaatggctgtctcaattcggcgcttccgcttccggcggagtgacgaggcttttatatacgaaagaatggatggacgcccagcttgccgtcaaaaagaaaatggaggcgttcgggctggaaacggcatttgacgatgtcggtaacgtgttcggccgtctgagcggcacagaatcgcctgatgaggtgattctgaccgggtcgcatattgacaccgttattgacggcggcaaatatgacggtgcgttcggcgtgctggcgggcatgctggcgatccggcatttgcatgagacgtgcgggcgtccgaaaaaaacgctggaggctgtgtcgctctgtgaagaggaagggagccgttttcccatcacctattggggctcaggcaatatcaccggtgctttctcgctttcagatgcggaaacgccgaaagacgcgtccggcatttctctgaaagaagccatgcggcagaacggcttcggtgcaggccgttatccggcgccgctgcgcactgatattagtgcctttctggaaattcatatagaacaggggcaaacgcttgaacgatcgggaaaggatatcgggattgtcaccgggattgccggacagagacgctataccgttacgcttgacggtgaatgcaaccatgcggggaccacttcaatgaaatggcggaaagatccgctcgcggcgggaagcagcatcatccatgaactcatgctctcagcggaaagacagccggaagagctccgcctgacgtgcgggaaaatgacggttgagccgaatatggcgaatgtcattccgggccgtatccagttttccgttgatattcgccaccagcaggaagacgtgctggcagccttccatcagaaactggtgtcgattattgaaaacatcagccgcagcaaaggagtcagaccctttattgatgaatatatgaggatagagccggttcaaatggatcacatactgacacgaaccgcagcacaggctgcaaaagagcagggggcggacccggagaagatcgtaagcggagcgggacatgacgcccagatgctcggcagaacctttccggcctgcatgctttttgtgccgagccgtggcgggatcagccactcgccgcttgaattcacacccgcacatcagcttgaaaccggcgtccttacgctggcgaatgtattacataaacttgcttattaacgtaaagggggaatcggcgtgccgaccagaaaagaattgtgcattccgcaaagaacgataatgacaccgggaccgacagaagctgaaccgagagtgctgagggcgatgggcgctccgatcctcggccagtttgacccggcatttaccggtatcatgaacgaaacgatgcaaatgctccgtgaattgtttcaaacggaaaaccgctgggcctatccgattgacggcacatcaagagcggggattgaggctgttctcgcaagtgtgatagaacctggcgacagcgtgctcgttccgatatacggacgcttcggacacctgctgactgaaatcgccgagcggtacggagcggacgttcatacgatcgagtgtgaatggggaacggtcttccggcctgaagagattatcggcgagatgaaaaagatttccccgaaaatcgtcgctatggtgcacggagaaacatcaacggggcggattcatccgctgaaagaaatcggggaagcgtgccgcgcccaagatgcactctttatcgtggatgccgtggccacgattggcggatgcgccgtaaaaacggatgaatggaagattgacgcagtcatcgggggaacgcaaaaatgcctatcggtcccttccggaatggcgccgattacttataatgaccggacggccgctgtcattgccgcgcgtaaaaaggtagaacggggcattgcgacagcagctgacggtaaaatgctgtccggtcatcggccggttacgagcaactattttgatctgagccagctcgaagattattggagtgaaagaaggctgaatcaccatacagaagcgacagcaatgctttatgcgctgcgggagggtgtgcgccttgttctggaagaaggacttgaagaacggttccgcaggcatcagcgccatgaaaaagcgcttacggcgggacttgcagcaatgggccttgatttattcggcgatccggaggcgaagctgcctgtcgtcacatgtgtgaagattccgccggaagcagacggcgaatcgataaggagtatgcttttgtctcaattcggaattgaaatcgccagttcgttcggtccgctgcaggggaaaatttggagaatcggaacgatgggctacagctgcagaaaggaaaatgtgctgtttgtgctggccggacttgaagcggttctgatcagacacggagttgcagttaaagccggggaagcgctgcaggcggcccttaacatatatgatctgccggctgaaaccggtatgctgtcatgagatatgaaaacgagattgaaatcatctggacttttttcccttttccccgttatactgaatggtataaaaaatgacaaatatggaatgatcatctgtttgtctggggagaaggtaagaaatcatggcgtacatggggcgattgtcaattttaatgctgaatatgtttattgcgatgcttgggatcggattgattattccgattatgcccgcatatattaccgaattcggagcgacggggagcacgatgggtctgcttgttgcggcggcggggcttacacagcttttatttgcgcctattgccggggaaataaccgacaaatacggacggcggaaactgattattttcggcattgccgcctttgccgtgtcacaattgatcttcgcctttgccggaagcctgtggcaattgttcgcatcccgccttttgggcggaatgggcgcggcgtttttaatgccgtcaatgttcgcttacattgcggatattacgaccgaggaagaacgcgggaaaggaatggggctgttcagcgcggcgatgacgctcggtgtcgtcatcgggcccggtgtcggcggttatttggttcattacggcatgtctgtgccgttcatcgtgtccgcaagtctcgcctgcttttcaacggtgctttcatttttctttctgcccgaaacgctggggcgtgaaaagcagctggaagcccgggcaaaaacggaaaaacgtgagcatctgtttaagcaaatgtcacgcgcgctcaaatcgccgttcgcgtttatgctgattctggtttttgtgctgaacttcggaattatgaactttgaatccgttttcggcctttacgttgaccataaacacggatttaaagcctctgatattgcctttattattacggctgcgggtctcatcggcgtatttgtgcaggcggtcggcgtcagttatctcgtccgcaggttcggggaaaagcgcgtcattaacgtgacgttgatcggggctgctgcaggacttgtgtggtgccggtttgcgggttcatattgggccgtttttgccgcggcaatctttttcctgacgctgacatcgctgctccggccggccgttaatacgatgctgtcgaagctcgccggtgaccagcaggggtttgccggcgggatgaacacctcattcatcagcttagcgaatatcgccgggccgtcggccgccggttttctctttgatgtaaatatggaatttccgtatatgctgggagcggccattctcgccatcagttttctggccgcgcttggctggggcaaaaagacacagacccggccgttcacgcagcaaggataagaatcaaaagcctccgggtatccggaggctttttgctgattgtcgtttattctgcggctgtctgcatctctgaaattgcagagatgcgcatagagggaaaatcatatagcaaaaacagttgttccgtatgctcaagcatggcgcgaatggaaaccggaacaggtgtagataaagtaaaaccagctttatcgcttgacgagtctgatgaatttgatctgccggaagttgatcaaaaaagaaggcagtcaggcaggcagggacaacattgagcggcgtaaatgctgagaaggaaaaagcagggttttggaacttgctgtttcgtatgcagggggagagcattctgataaaacgggtcattgaaataatacgaactgttcagtagggggcgattggtgacaacaaggagaggttatcttataaaacctctcccggaagatgttgtgatggttctcctgcatgaattttgcagattaaaacccgcaattaggccaacacacaattatgcaagagacaatcatctaaaaaggatgtcggtaagtacaatatggtgtacggaaaaggagttgaaaatgttgtattattacccgtcattccatttgtatcagcggcaagaatttaattattatccatgggcccatcaattgactcattcagggggctccccctatgtttccgcgcgccctcctttttataattccccatgttacagagagtgcataagaagcggagcggatagttatttctgctgctatatctgcggtttctgttaaaaagaaagacttatagaagtaagtgatctttccaggatgacagtgagaccattatccagacagccattagccaacacacgaagctttattacggttcacggaggggaagcgcccctcctttttcagaaattttataaaatccccttgcgcggcctgtcagaagcggtttttggtcttgatgtgttcgactgttggtgttgacgaagaattcaagataccaggaagcagcgaaacctgtatgtatccgcgagacacaaagctttccgccgctgagcgggttcattgtcactgcgttctgtctcctgtagtagataacgagattttggggctgtcagttgaggaaaaataaaaaattcaaaacgtcgcaatcgtttaattaaaaagaagagatagaatctatctcttcggattattactgaactacaaaatggtatcgggttttccaagtggaggaatcatcatagaattcaatccaggcttctcctttagcgactgcaaatacctgaatggttttgtagtcagtacctaaagctctccatgtcacagcaggagggttataacccgtaggattaaaggaaatgcgattaccagaagtagaataattccttatctctcctacttttaaattgacgcgggtttcagactgagattgaaacaaattcttattcactttagtagagggaccggcggctgatgctgaagagttaaaaaaaggcgcgaaaacgaatgaaacaattgcaagtgataacaaagcatttttagctagtttcaacgtaaaacctccttttggtatttataggataacagtaacacttaatggaaatataacaatgaagaaattgttaaatattctttgaaatgagtgaacacatgccaagtgaattgataaatgcaaacatcatacatgtttcttacgtagataaggctgctaatcaaaagcggtttttttatgaaatcagaaaaggaaaagcagcatgactttcagggcggcgtggggaagtggttgagtcttgtgtcgctccccgctgattttcaaatgaatggcgaaaccatcaaaaaagggtcatgggtgcttgtgacaaaggttccgaggcagtttaggatgaaatcaaaaagggtgagattatcggttgcatcctgaatatcgaaaaagcctgatgatatcaatggcagcattttttgagggtttagctgaatgaatcccccttaaataggatgcgggagaacacccgcatcctggtctatggctaaattttaaccgatcagccgctgcattctcagcgcgagccgcaggcgcatcgtcgtctccggatcttttaagcttttgccgagcagttcctcgcatttttctaaacgatagatcaccgtatttcgatggacgtacaggcgcttagccgtttctgaaatctggcagtgggtttccaggtaaacagacagtgtatgaagcaggctctggtcctccttttgccggtcggccaggctttggagggtggcttcgtaaaactttttcacatcttccgccggaagcaggccgagcaactccggcacgtctttggcatgatagatttgaataaactccgcgcttctggacaaatgcccggatgaaatggcgtctgaagcttcagtaaaagcgtcagggacatcgatcagcttttggcatatgtttgagatgccgaaggagacagtccgtttaaactgcgtccggacctgtttctgaaactgctccaaaaagctgatgacagacgcgtgcatttcattccagctgtctgtcgcttcaattaaaagaataccgacatttcctttaataaagagatgagggggaaacggaaaggatgacagctccccttcaagcagatcaaatacatgatcggaaacgagctgattttcggtaaagctgatcgttttctcatttcggtcgagttttccgcaaatgcacatgtatttctgatcccagcggagccggaattctttggcacggcttttgatttcttcatggccggtaaacgagcggtcgatgaaattgctgaaaaattcattgcgcgcccgtctgccgaattgtttgacggcattttctttcagcagttcaaaggaaatgacgttggccgcctgttcaattgtcaaaatcatgcctttatcagcggtctgcaccagctccggaatcaccagataaccgcagtttttttcaacattcagaatcggcaggacagaatacacctttctgtcggagagcatggaaaagcaggtgaaataaggaccggaaagggaataacagatgtttttcaataaagacgtgtcaatgggtatgctgtgggacgatgataagagttttgtatgctgatccaaaagcagcacgggaagccggagaatgtctgagagcttcttaagcagggattgcagccctttgccgctcatgatgtggtttgtaaattttttatgggcgtaaatggcctgctgcagctcatttgaacgcatatcaagaatatggctcaatgtagcattgacgatatctcccagcctgatgtcttccggcagctcaataatcggaaattcataccggtcggcaagctctgcggcatctttcggaatgacattaagatagcgcttcgttttgatccccagtcccgcgcatccccgttttgccatgaggcggattaaatctttcaacagctgcgggcggtccttcaagtggtaagccgtcgtgacgagcaattcgtttttatgtaaaaaatcagcgatgtccggcgcatccatcatgttgacgtgctgcacctccctccagccgccggatctgcctgcgattaatgcggcccgctcataagcgggaatcttcatcacatcataaatattcatcagtcaatctcctttcaggttctaaagacaaccattggttaatatgaataaaagtcatcaaaaattatagcggttttgctgatgtattacgatcatagtagcagtaaactggcaatcatagacgcatgttgtgataaaaactgacagaaaatcgtcatccttacagggaggaagataaaatggcctatgacgtaattgtaaagggtgcgaaagctgtgcgaaaaggcgggacagagcgggccgatatcgccgtcaaggacgggaaaattgcattgatcgagcccggcattgacgaaaacgcggaacaagtggtgcaggcagacggcatgtatgtgtttccgggcgcggtcgattgtcacgtgcatttcaatgaacccggacgcgaagaatgggaaggcattgaaaccggctcaaacatgcttgctgccggcggctgtacggcttattttgacatgccgcttaactgcattccttcgacggtaactgctgaaaacctgctggcaaaggcggaaatcgccgaacggaagtcagcggttgattttgcgctttggggcggtttgatgcccgggtataccgaacatatccggccgatggcagaagcgggggcaatcgggtttaaagcgtttctgtctaaatcgggaacggatgaatttcaatcagccgatgaacggactcttttaaagggaatgaaggaaatcgcggcgtgcggcaggattttggccctgcacgcagaaagcgacgccctcacccgattccttgaagccgagtacgcgctccaagggaaaattgatgcccgcgcttacgcttcctcccgtccggaagaagccgaatgcgaggctgtgcagcgggcgattgaatatgcaagagcgacgggatgcgcgcttcattttgtacatatcagcacgaaacgggccgtgctctccattcagcaggcgaaaaaagacggattggatgtcaccgttgaaacgtgtccgcactacttattattcagctttgaagacttcctcaaaaaaggggcggctgccaaatgcgctccgccgctccgctcagaggctgataaagaggaattgatcggggttttggctgaagacctgattgatatggtgtcttcggatcattctccctgtcatccggctttgaaacgcgaggataatatgttcctgtcgtggggcgggatcagcggaggccaatttacgcttctcggcatgattcaattagcgatcgatcatgggattccgtttgaacatgtggcccgatggacggccgaagcacctgccaagcgtttcggtttaacgaataaaggccggcttgaagaaggatttgacgctgattttgccattgtccggccggaaccttttaccgtcacaaaagaaacgatgttttccaaacataagcaaagcctgtatgaaggccgcacctttccataccgaattgctgcgacctacagcaaggggtgctgtgtgtatcaggatggcggtcgtaagcagagcgggtctttcggaacattcctgaagccttgtgaaataaaaaagccgattctctgatgagaatcggctttttttgtcgtttggaaagcgggtctcgtggtatctttttataaaaaggagtaaaacacattgtatgatcaaatcttgaacatattaacggcatcctggtcgcgcaagaccagtacaaaatggacggaagattgcccggccacaggccagtgcggcgtgacggctttagtcatccaagatgtttacggcggtgacattctcaaaacaaaaaccggcacaagctggcatttttataatcgaatagacggggagatatatgatttcacgagcggtcagttttcagagccgatcgtctatcagcatattctttcttccagagatgaggcattttcggacaccaatgaacatcagtaccgttacctgcaaagtgcattcagaaaaaacatggaaacggaaagagaaaaacacctgtgataaactagaatgagaggtgaaggattgtgatttatatcggactgacggggtggggggatcatgacagcatctatccgcctaaaacagcgggcccgcaaaaactgcaggcgtattcctcccattttcccatcgttgagctggacgcgagcttttacgcgatacagcccgcccgcaataacgaaagatgggtcaaagagacgccggaatcttttcaatttgtcattaaggcatttcaaggaatgacgggccatcagcgcggtgatattccctttgaatcgaaggaagaaatgtttgaggcgtttaagctgtcattatcgccgtatatagagcatggaaagcttgccatggtgctgttccaattcccgccgtggtttgactgcaagaaagaaaacgtcgcatatttaagatggtgcaggaagcagatgggcgatatcccgtgcgcgcttgaattccgcaaccgatcttggttttccccgccattttacgaacagacgctttcctttatgaaggaggaaggctggattcacagcatatgtgacgagccgcaaatcggcgagggcagcattccgaccgtcctgaaagcaacggatgaagaaaaaacgcttgtccgttttcatggacggaacaagcagggctggatcaaacctgacggcggacaaaactggcgtgaggtcagatatttataccgctataacaaacaggagctcaaagattggaaaaacaatcttcaggagctgaaaaagcagtcgcgcaatctgtatgtgctcttcaacaataactcaggcggagacgccgccgataacgggcttgagatgcttgaaatgttagatatctcatataccgggcttgctccgaagcagctcgacctattcagctagaaaagaggtttcaagacacatgtcttatcttattttgattatattgggatttatcgcgggaacggtcggcagcctgatcgggcttgggggaggaattatcatcgtgccggcgatgctctatttaagcacgatgaccccgtttttccatgacgtaacaccgcagactgccatcggcacgtcccttttggtgattatttttacgggcctgtcatcaactctggcctatatgaaatataaaaccgttgactacaaaagcggactgatcttttttatcggttccggcccgggaagcatcatcggcgcgtatttgtctaaactttttaatgcgcatacgttttccgtctggttcggactttttatgattttgatttctattacattaatgctgaaggcgaaagcaaaaccggtcaataaagcgcataaaggcatgatccggacatatgaggatgaaacgggtgagctttatacatattcgtaccgtatttttaccggtatcgccattgcctttttcgtcggtttattgggcggtcttttcggcatcggcggcggctctcttatggttccggccatgatgctgttatttttgttcccgccgaaagtggctgtggcgacgtcaatgctcatcattttcttatcctccgtgacgggttccgtgtcacatatcgcagagggccatgtcaattggctgtatgcgctgtgcctcgttccgggcgcgtggttcggcgggaaaatgggcgcgtgggtcaataagcgggtgcagacgaaaacgatcgtgcttttcatgcgggtcgtcttgattttgatcggctgtgaattgatttatcaagggatattcagctaaaaggtaggagagatggtatgttagagaaactccgtttatatcatacgaatgatttgcacagccatttcgaaaattggccgaaaatcgtacattatattgagcagaagagaaaagagcatgaaaaaaacggggaggaaacactcgtattcgacatcggcgatcatatggaccgatttcaaatgataacggaagcgaccttcggcaaagcgaatgtcgacttgttaaaccggcttgagatcaatgcggctgccgtcgggaataatgaaggaattacgctgcctcacgatgagctggcgggtttatatactcatgccgcgtttcccgtcattgtgtccaacctgtttgacgcggacggacagcggccggaatgggccgagccctacgtgatcaaaacgctgaaaaacgggatgaccgccggcatactcggggtcacggtgccgtattatcccgtctatcagaaactcggctggacggtgacggatgcggaaaaaagcattcaagaatcacttgacgatatcaagggcaaagcggacatcatcattctgctttctcatttaggcctgatcgatgaccgggccgcagcggaaaaatttcccgacatcgatgtcattcttgaatcacatacgcaccaccttcttgaggacggacaggatataaacggcgtattgcttgcatgtgcggagaaatacgggaactatgtcggctgtgtcgagctgacgatagaaagtgaatcacgaaccattgtcagcaaacaggcatctgtacagaaaatggctgattggcacggggaatctgaagatacggcggcttttctgaaagagaaagaacgggaagcggaaaacctgctctccgtacaagtcgccaatctgaatgaagaagccggcgtgaagtggtttgaggaatcgccgctcccgcttctattagccgaagcgctgaaaagctggtgcggctgtgaagtcagcatggtgaattcaggcgtcattttggggcctttacagaaggggcctgtcacaaaacttgacttgcaccgcatctgccctcatccgatcaatccggtcgccgttcgtctttcaggcagggaactccgggaaacaatcagccaggccgcctcggaacaaatggagcagctgcggattaaaggcctcggcttccgcggggaagtgatgggcaggatggtatatgccggagcggaggcagaggccggcatccttgaagacggtgtgacgcatctcctcaatgtgaaagtgaacggagaagaggtggatccggagcggatatactcggttgccgttctcgacatgtttacactcggaaagctgttcccttacatccgcgattcaaaagaaaaacaatattttatgccggagtttttaagggatctgctcgcctggaagctcgcgcggcaagcgtaatgtcaaatatccgccggccgttccatctcacccgaatgaaggtaagcgggactttttaagagcaaaaataaaatactatgtcccctcttacaagcatacattgtgatatgtaaggggggatttttcttgcctagataccggagcgctcttcgcaagagagggcctttgccttttcgatatgtgcttcttctgtcgtttgctttttttatcatatcgacggtcatcagcctctggatgatcaactcctcaatcaaaccggtgctgatgaacataggagaaatggaaaccaaacgggtggcgacagaggtcattacggaatccattgaagaatacatgtctcacagcgacaatgtgaaagatatggtcgatatgaaaacggatgaaaacggaaaagtcacaacgatggattttaatacacaaatggtcaacagcatgaaggcgaaagtgacaaagcagcttcaggctcatttgaaggaagcggagtcgaacaataagcagcatgaaacggaaaaaggcgcgaaaacggccgatgaaattatgattaacatccctttagggcaggtcacgggaaacagcgttctcggaaatctggggccgaaaatccccgtgcgctttaacctgatcggtgatgcgttaactgatgtgaaaacaaaaataaagccgtacggcattaacaatgccctgatcgatatcagtatttttgtggaaattaaagtgaaggtcattattccgtttgccagtaagacatcagtcgtcacaaataatattccggtctccattaaagcgattcaaggagaggtgccgcagttttataacggaagcggcggatcaggtgtgacgccttctgtccagctgccgagtgaaaaacagaagaaagataaataaaaacacacagccgcaatctttcctggcggctgtgtgtttactttttcctgcggatttcttttcgctcccatgcccttaaatggggatacgggtcaaaagaccattccgatctgccgttatctttatacatcccgtagtgaagatgcggcggaaattttcccgcggtgcccggcggtccgtatccggaactgccgacagagccgatcacctctccgggtttgacgatctggcctttatgcacaccttttgcaaagccgttcaggtgagcgaagtagtgatacgtgttattgatatccctgatgccgattctccagccgccgaaacggttccagcccttcatttcaacaataccgtagcaggtcgatctgacggggagtccgtaatgagcgaacagatccgttccttcgtgaatccggcgcccgccgaaaccccgtgcggcgccccatgtgctgcggtagctgtaatccgtcttcacgggaagcggaaaagcgtgctctccgagatcaaggcggccgaacgttttaaacagtgtcatgaattcggtgataatgccgaccgtctgatcacggcggtaataattccagaggccgatgcggatatggtcaagatccgttccgaatcccgctaaatactgtgcaaatgtataaaggatatcctcatcattgctgacctcggcttttccgtcgccgtcgccgtccaggccgatcccgtcaaatactttaatgctgaggggcgcctcgtccttaggatttggattttcaggcccgctccacaaatgatccggaatataaatgctgatgattcccgctttttccggcagatcctttcggttcgagcggacattttcttcatattgatcaaccgccgcaagcacataccaaggaatctgcgtgactgcttcggctttgcggtacaactgcatccgttcaccgtaaacaggagccgattgttctttcccgcttgcagccggacagaaaactgataaaaggagaagagcagataacagaactttcacaacatgatctcctttcaggattaatacaactagtttgcggcaacaatccgagaaaatgtaagtaattctcttcccttgtcgagaaatttttcctatgttaaagtgactattgaatagaaatctgcaagttttatatccatcgtgaaatagaaatttttcgcacacgaacatgaataaagggataatggagatgatggggaaatggcaaagaaagacgagcatctgagaaagccggaatggctcaaaataaagctgaacacgaatgaaaactatacgggtctgaaaaaattaatgcgtgaaaataatctgcataccgtatgtgaagaagcaaaatgcccgaacatccatgaatgctgggctgtcagacgtacggcgacgttcatgattctcggttccgtctgtacgagagcatgccgcttctgcgctgtcaaaacgggtctgccgactgagctggatctgcaggaaccggaacgcgtagctgattcggttgcactgatgaacttaaagcacgccgtcatcacggccgtggcgcgtgatgatcagaaagacggcggagcaggcgtctttgcggaaacggtccgggcgatccgcagaaaaagcccgttcacgacaattgaagtgctgccatccgatatgggcggaaattacgacaacctgaaaacattaatggatacccgtcctgatattctgaaccacaacattgaaaccgtccgccgcctgacaccgagagtccgggcccgcgcaacatatgaccgttctttggaattcttgcgccgtgcgaaagaaatgcagcctgacatcccgacgaaatcaagcattatgatcggtctcggcgaaacgaaggaagaaattattgaagtgatggacgacctgcttgcgaacaatgtcgacatcatggcgatcggccaatacctgcagccgtcgaaaaaacatttaaaagtccaaaaatattatcatccggacgaatttgccgaactgaaagaaatcgcgatgcaaaaaggcttcagccactgtgaagcaggcccgcttgtccgttcttcctatcatgcggatgaacaagtgaacgaagcgtctaaaaaacgccaggcccaagcataagataagccgaaaaaacccaaaacgccgcaggttttgggttttttgtgatggagccgtctgtgcagggaaaaagtcattcttgaataaggatcgtcagaaccgctacactggatataaaaggggaaaatttttccgtccgtccgaaccgtctcattttgcaattgatggacagaagtcaatgaattatgatagtaaagagtgataaaagaggtgaagacatgattcttattcaaaatgccgagtttgaactcgtacacgattttaaaaacggctttaatgaagaagcgttcaaagcccgctattcggacatattaaataaatatgattacattgtgggagactggggatacagtcagctgcggctcaaaggcttctttgatgaccagaatcaaaaagcaacctttgaaacgaaaatcagcacattggacgaatacatttacgaatactgcaatttcggctgcgcgtattttgttttaaaacgaatcagaaaataattgatgcagaaggggatgctgtcacgtgtattttgttgacagaaataatatcgaacaaacactccgtttttttgagacccagctggcgctgtttgacagcacgcctgcatggcagagcgaaatcgaaaaaagggcgcttgagcggatcagccatcttatgatcgaatgcattctcgatgtcggaaatgatatgattgacggctttatcatgcgcgatccggggagttatgacgacatcatggatattctgacggatgaaaaggtggtagctgaggatgaagcgaataagctcaagcagctgatctcttccagaaagcggcttgttcaggaatatcagcaagccgatcatcaggagctgtttacgctgatcacgtcaaacagggacgtgctgaaagcctttccggcccgtgtaagaacctacctggaaacagaattagggcctgtttccgcatttaaataacaacgagtgagaaaatccacaggagtgttgagtatgaaggattataaaggatatttgatagatttggacggcacaatgtacaacgggacggaaaaaatcgaagaagcgtgtgaattcgtgagaacgcttaaagcgcgcggcattccgtatttattcgtgacgaacaattcttcccggacgccgaagcaggtggcggacaagctgatgagctttgacattccggcaactgaagagcaggtcttcacgacgagcatggcgactgcgcagcatatcgcccagcagaaaaaagacgcgtcggtgtatgtgatcggcgaagaaggcatccgccaggccattgaagaaaacgggctgagcttcggagaagaaaacgcggactttgtcgttgtgggaatcgaccgcggcattacatatgaaaagttggcaacgggatgccttgcgatcagaaacggcgcccggttcatttcaacaaacggcgacgtcgccattccgactgaaagagggcttttaccagggaacggttcgctcacatccgttttgacggtgtcaacgggcgttgagcctgtctttatcggcaagcctgaatccattattatggaacaggcgatgcgtgtgctcggaacggatatttccgaaacactcatggtcggcgataactatgcaacggatattatggccggcctcaatgcgggcatggatacgctgctggttcataccggagtgacaaagcgtgagcatatggcagattacgaccggaagccgacatatgcgattgactctttaaccgaatggattgaacatctataaaaaagggacggccatgacggccgtccttattctgtatttctggcgctgtgggcaagccggcttgaagccgctgctgcgattgcgccgacgatatcatcaagaaacgtatggcattcccccgtagatttatcatttaaccgcccgagaatgccgggtttttctttgtcaatgtagccgtaattcgtaaagccgattgagccgtatatattcacgatagagaaggcgagcacctcgtcaaccccatacaggctttcatcaatcgccagaatggtctgaagcggttcagacagttttttttgttcggcgagcacatctaattctattcccgttaaaatggcgttttgcacctcgcgttttgcgatgacacggtccacattgagcctgcatacttccatcgtcaaatcaggatgatattttttctgaaggaaatacaccagctcggcaatatcgtccgtctcaaccccccgttcttttaaacgcgctctggcgacagcttccacctgattcagttgttccttttctgacatttgcttcacccaatctttttttactagtttatacaacacccttccgatgtgtacgatgtttctccacttgattcaaaggattacaatatgtattcataattccgccggcgtatgactacgatgtgaatagctctaatttttcaggcaggtgattatgatgaaaagcatcattaaagaaaagtacggcatccacgtcagacagctttccgtttatcagaaataccaatgcttccagacgcctaattccttctttcttattattcccgtttccgggttttcgcaatcagagctgacggagctttactacatgagtcagtatttacaagaacaaagtgacccatacgtttcagtgtttatctttacgaaggaaggagaactgacctttgaggacgaaggcaaaacgtatgcgctcttaaaagcgccgatccccgtcgcaaaccggtcgttctctgtcggaggggagcttgccgaatttcacagaaaagggcggggttttccgtacgaagtgaaagaagcgggcaggatcggccaatggaaggacttatggggaaaacgggtggatcagctggaatcattctggatgcagaaaattcatatgtctccgcttgaaccgttcgaaaagaaaatgatcgaagcatttccttattattcaggcttagcggaaaatgcgattcaatatttagtggatacggagctggatgacaatcccggcgcagaagactcggggacaatctgccatcagcggatggaacgggatacctggtcggaggaatcattgatccgcattccgggcgattgggtattcgaccatgccgcccgtgatattgcggaatatatgcgcagcacatatttgtatcatcgtgacgacttgcttaacgaagggtttttgtttttgcaggaatatgagcaagttacgccgttatcctccttttccaagcgcctgttttacagccgcctgctgtttccgcttcatttctttgagacggtggagagttattacatttctcatgattctgaaaaacagttttacgaagagcagcttgactacattcttgccgactgcacccgctatgaacagtttttacagacatgtcacgacatgatgaatgtcaggtcggcgcaggtttttgtcccgcctgtggcgtggctcggaaaaggaatcagttcgtaagaaaatataacgtaaaaatatttagaaaatagggaatcttgtcatatcaatgtgttaagcgttttcatggccgtagaaacaatattcagccgcttgtcaaaacaaatgcgggcttatataatatttgtaacttaaatgtctgtgaagggttaacaattgtccttttctagtggacaaaaggaagaaaggtggagtttctctttggaagcgattcgtattggactgttaggactgggaaccgtgggaagcggagtcgtcaaaattatacaagatcatcaggataagcttatgcaccaggtcggctgtccggtgacgattaaaaaagtgctggttaaagatattgataaaaaacgagacgcagacctgccgaaagaagtgctgacgacagaagtctatgatgtgatcgatgaccctgaggtcgacgtgattattgaagtcatcggcggtgtcgaacagacgaagcaatatcttcttgatgccttgaaagcgaaaaaacatgttgtgaccgcaaataaagatctgatcgccgtatacgggtcagagcttttagccgccgcaaaggaaaatggctgtgacttgtattatgaagcgagtgtcgccggcggaatcccgattttacgcacgctcgaagaaggcctttcctctgaccggatcacaaaaatgatgggaatcgtcaacggaacgacgaacttcatcttaacgaaaatgattaaagaaaaaagcccgtatgaagaagtgctgaaggaagcgcaggatctcggattcgcggaagcggacccgaccgccgatgtagaaggactcgatgccgcacgcaagatggcgattttagcccgtctcggcttctctatgaacgtcgatctggacgatgtcaaggtaaaaggaatttcccggattacggatgaagacatcagcttcagcaaacggctcggctatacgatgaagctgatcggcatcgcccagcgtgatgacaataaaatcgaagtcagcgttcagccgacactgctcccggatcatcatccgctctctgccgtgcataacgagtttaatgccgtttacgtgtacggagaagccgtaggcgaaacgatgttttacggccccggagccggaagcatgccgactgcgacatcagtcgtttccgatctggtcgcggtcatgaaaaacatgcgtctcggcgtaaacggaaacagctttgtcgccccgcagtttgaaagaaatctgaagcagccgtctgatatctacgcccagcagtttttaagaattcatgtcaaagaccaggtgggctctttttcaaaaatcacatcggccttctcagagcgcggcgtcagctttgaaaaaattctgcagctgccgataaaaggacatgacgatctcgcggaaatcgtcatcgtcacgcatcatacatcggaagaagatttcagtgacattctgcaaaacttaaatgatctagaagttgtacaagaagtaaaaagcacatatcgtgtagaagggaacggttggagctaatgtggaaaggactcatccatcaatataaagaatttctgccggtgacggatcggacgccggccctgacattgcatgaaggcaacacgccgctgattcacctcccgaagctttctgaaaagctcggaattgaactgcatgtgaaaacagaaggcgttaatccgacgggatcttttaaagaccgcggcatggtcatggcggtcgccaaagcgaaagaagaaggcaatgataccatcatgtgcgcctcaacaggcaacacatccgctgcggctgccgcatacgcggcgagagccggcatgaaatgcatcgtcatcatcccggacgggaaaatcgccttcggaaagcttgcgcaggccgtcatgtacggtgcggaaatcatcgcgattgacggaaactttgacgacgcgctggccatcgtccggtcgatttgtgaaaaatcaccgattgcattagtgaattcagtaaacccttaccggattgaagggcaaaaaacagcggcctttgaagtatgcgaacagctcggcgaagcgccggacattctggcgatcccggtaggaaatgccgggaatatcacggcctactggaaagggttcaaagaatatcatgagaaaaacggcaccggacttccgaagatgcgcggttttgaagcggaaggttctgcggctatcgtccgcggcgaagtcattaaaaatccagaaaccgttgcgacggcaatccggatcgggaatcctgccagctgggacaaagccgtgctcgctgcggaagaatcagccggaaaaattgatgaagtcacagatggagaaatccttcacgcttatcagctgattgcccgtgaagaaggcgtatttgccgagccgggctcctgtgcatccatcgccggcgttttgaaacaggtgaaatccggtgaaattccaaaaggaagcaaggttgtcgcagttttgaccggaaacggcctgaaagatccgaatacggctgtggacgtatctgacataaaaccgatcacgctgccgacagatgaggacagtattctggaatacttaaatggagcggcgcgtgtatgaatgaggcggagatgctgttttccattacggttccgggaagcaccgccaacttaggacctgggtttgattccatcggaatggcgctcagcagatatttgaagctttcggttttccgaaacgatgaatggcagttctcggcggaaaccgaaactgtcgcgggcatccctcaaggaacggacaacctcatctaccaagtcgccaaacggacggctgaccgctatcagaaagagctgccgcccgcccatgtcaaagtttggagtgacatcccccttgcgcggggtctcggaagcagcgcggccgctatcgtcgccgccattgagcttgcggatgagttatgcggcctgcagctgtcggaaagcgacaagctgcacttagccagtcttgaagaggggcaccctgataatgccgctgcttcccttgcaggagggcttgtaatcggccttcacgaagaagatgaaacacatatcgtgcgtgttgccgaagcggatatcgatgttgtggcagtgattccgttttacgaagttctgaccagggacgcaagagacgtgctcccgaaagagctgccgtaccgacgcgccgttaaagcaagcgccgtcagcaaccttctcgttgctgcgatcatgtcaaatgactgggcgctcgccgggaaaatgatgagaaaagacatcctccatcagccgtaccgcgccatgcttgttcctgagctttcaaaggtggaacacgcggccgaaatgaaaggcgcttacggaacggcgctgagcggagcgggaccgacgattcttgtcctgattgaaaaaggaaagggagaagagctgagaaaacagctttctgagcatttccctcactgtgagattgcggcgcttaccgtcccgtcagaaggaagcgtaattgaacggaatcctttagagcaggtgaaaagtgtataatgataaaaaagcgttcttcccatcagagaaggacgctttctttttctggagaaggatttttatttagggaagcgaaataaaaaagaaaaggaggagatacgattgaaaaaactcataaccgaggaggacattgcgtcactcgtatccgtgacagacccgcaatatgcccctgacggcagaagagccgcttacgtccggacaacagtcaatcataagcgtgattcctattcctcagccattatggtatatgacacagaatccggcatctcaaacccgtggactttcggggacgataaaaatacaagtccgcggtggtcgcctgacggtcggcgcctcgcctttgtttctgacagggaggacggcatccctcagctgtacatcatcgacgctgccggcggagaggcggaacaggctgccgatattccttggggcgtatcagatccgatatgggcgcccgacggcagatccgtgcttgtgtccgtcagtctgacatcagcggagcgcgccgatgagaaagaaaaaaagaagcatgacgagtatgagccggttgagattcaatcattaacatataaacgtgacgggaagggcctgctgaacggaagccggacacagcttgtgctgattcatcttgaaacgggggagattcagcagctgacagatcatgaagctgatcattatggcgcggccttttcaccggatggcaggcagcttgcgtttaccgccaatttatgcgagccgggtgacgccggaaagccgagcgatgtctatctgatgaatctggcggacggaagcctgaagcagattacgccgcaccgcggttctttcggttcctgcgtgttttcaccggacggttcttatatcgcgatgctgggccatgagaatgaatttcgcaatgcgactttagagaaagcgtggctgtacgacgtgaaaactgagcggctgtcctgcctgaccgacatgctggatgttcatttgagcgatgcgctgattgcggattcaatcataggaggagtgacgccccggccggtatggacaaacgacgggcagggcttttacgttctcgggagcgagcagggaagcaccggtatttattatatctcgattgacggcctcgtatatccgatccgattagaagaagagtacgtgaacggttttgcttttcatcctgatcagaaaagctgtatcgctgtcattgccaaacccgcacagccttccgagctttacagcatttcacttgaaaatggggaagagaggcaattgacattttacaatgatcggtttatagaggagcgtatcatatccgtgccggaaaagctgcaatatgaaacaaaggacgggctgacggtaaacggctggtttttaaagccttccgtttttgaagaggatcaaacatatcccctcattctatacatacacggcgggcctcacatgatgtacggccatacgtattttcacgaattccaagtgctggccgcacaaggatatgctgtcgtgtatgtcaacccgagaggaagccacggctacggacaggattttgtcaatcgtgtcaggggtgattacggaggcggagattaccgtgatgtcatgcaggcggtggatgaagccgttcaggcgtatccgtttttagacagcggccgtctcggtgtgacgggcggaagctacggagggtttatgacgaattggattgtcggacagacaggccgttttaaagcagccgtcacgcagcgctccatttcaaattggttcagcttccacggtgtcagcgatatcggcttcttttttaccgactggcagctcggacatgatttgtttgaggaagcggataagctttgggatcgttctcctgtaaaatatgcatcccgcgtttcgacgccgcttttgatcctgcacggtgagcgagatgaccgctgtccgatagagcaggcggagcagctctttaccgcgttgaagaaactgaacaaaacgacgtcgttcatccgatttccgaaagctacgcatgagctgtcgagaagcggccatcccgaacagcggatgaaacgcatccgttatatttgttcatggtttgatgactatttgtaaaaataaaaaaaccaggctgtcatgcagcctggttttatgattaaaatacttgttctacttcaacgacacccggtacttcttcaagaagggcgcgttcaattccggctttcagcgtaatcgttgaacttgggcagctgccgcatgcgccaaggaggcgaagctttacaatgccttcgtctacatcaacaagctcacagtcaccgccgtcacgaagcagaaacggacgtaatttatccaatacttcctgtacttgctctttcatttcaacctcagtcatgagattcgctcctttcatatacataaaaccattatattcacagtaacggtaaaaatctaatgtttggtttgcaaagctgctttctccattatagcatatttaaacttgaacataaaaaccgttttttatacaaaagctgccccgtcctttgtatactggtgtaaaggggatgatatacatgacaaagccggttacgctcagtgtttacggcgctgaaacgctttgcgcaagctgcgtgaatatgccgagcgccaaagatacgtttgaatggctggaggcggcgctgaaacggaaatacccggagcagccttttaacatgcggtatattgatattgaggcaccgcctcagcaaaaggagacagaagagcttgcggagcgcatcaagaacgatgaatttttctatccgctcgtgctggtggaggatgtcattgtgggggaagggaatccgcatttaaaagatatatatgaagaaatggaaaagcgcggctatgtggcgggctcttaaaaatggccgctgatcgcaatcagcggcttttttcttatcagccgttatgatgcttgtacatccataaaaggcctgattttaataaacggggcacacgcccgatgagcggacggtcgttgacaagaccgaagcccgctttttttccgagtgaaccgaggacgcctttcagcttaaattgcggcattgtttccggcagctcttcattgttccagcgtttcaggaggatctgcacaatttgttccgcctgcgcttcagccagctgggcgctcggcgcatgcggcaggctcgcgcaatcaccgacgacgtaaacatgctcatcgcccggaagattgtgatgcggtgttaaaacgatgcggccttgcgggtctttttcagcgtccagttctctgacggctttattcggctgaattcccgccgtccacacgatggcatcggccggtattccttcatcatgattataaacgatgccgtcttccacttttgtaatattcgcattattgataatggtgacgccgtgttcttcaaaccatttctgaacgtacttgctgagtcttttcggaaagcttgataaaatcaggtcgccccggtcaaataacataatcttcagatcgtcacggctctctcttaattcactggcaagctccacgccgcttaatcccgctccgacgatagcgacagatgcattggcgccgaggttgttcagcttttgataggcttcgcgtgactgatcaatggtctgaatgctgtaagtatgttccggcgcgccgggcacgttatgatacttatcctcacagcccagtccgatcaccgcgtcatcgtaagaaatcggttcgcggtcatgaaacagaacctgtttgtttttcgtgtcgatggaagccacctcaccgtattgaacatccagattcggatgctcaggaaaagacaccctgatatgatgatcagaaatcgtgccggctgcgagcgcataatattctgtttttaagcagtgatacgggtttctgtcaatcagcgtgatggatacatctgacggaagctggttcggcagtaagcggtgcagcacccgcatgtttccgtaacccccgccgatcaagaccaattttttcataatgattccccttttgcccgaaaaatatggtagtcaatattgttacaaaataacgaactatgtaaaataacatctagaattatatcgaatttgatctaaaaccacaataatagttttaaaataacctacaaattgaccagaaaacacgcaatagtaaaacctttaacctgaattaatatgttacgataacattgagcgtgaaaccggatctttgacgaatagaggaaattccgttaggataaggtacatatgtgaggtgaaaccgcatgaatccgatgattgaattctgtgtcagcaatttagcgcgcggttcccaggaagcacttgagatcttagagaaggatccgaacttggacgtgcttgagtacggctgtttaagctactgcggaaaatgcatggagtccctgttcgccctggttaacggcgaagtggtcacggggggcacgcctgctgagttggttgacaacatatatacattcatagaagaaaatccgatgttttaatcagaggctccgaacggggtctcttttttattgcgcccgggttttggcaaaataaaaaatttgtagacagcaaaaataaatattgttatcttaataaagactttttttaaataaaattttagaggtggattcattgaatatcgtttgggggctgctcggggcagttgctatattagccattgcttttttgttatcagagaagaaaagcaaaattaacctgcgaaccgtcattgtgggtttatgtttacaaatggccttcggattcatcgtattaaagtgggacgccggccgggccgtatttttatggttctcaagccgtgtgcagcttctcattgattatgcgaacgaaggcatcagctttatttttggcccgctgttaaaagtgggcagcagcccggctttcgcgctgagcgttctgccggtcattatctttttctcagcgctgattgccgttttgtatcacttgaaaatcatgcagctcatctttcgcgtcatcggaggcggactgtcaaaacttcttgggacaagcagaacggaatcgcttgcggcggctgcgaatatttttgtcggacagtctgaatcaccgcttgccattaaaccgctgattgcgggattgacccgttccgagctgtttacgattatgacgagcggcctttcggctgtagcgggttcgacgcttttcggttacgccctgttaggcattccgattgaatacctgctggcggccagctttatggcggctcccgccggtctcgtgttcggaaaaatgttaatacctgaaacagaaaaaacgcagacgataaaaggcgattttaatatggacgaagaaggcgaaggcgccgctaatgtgattgatgcagcggcaaaaggcgcatccacgggccttcagattgctctgaatgtcggcgccatgcttcttgcgtttgtcgcgctcatcgccgtagtgaacggaattctcggcggaatcggcggctggttcggtttcaaacatattacattagaatccattctcggttacgtgttttcaccgatcgcatttgtaatcggcgttccttggcatgaggcgctcggagcgggaagctatatcggacagaaacttgtgctgaatgagtttgtcgcttattcaaacttcggtccgcatattgcggacttttctaaaaaaacgtctacgattatcagctttgcgctgtgcggatttgccaacttctcttcgattgcgattatgctcggcacactgggcggtttggccccaagccgccgttcggacattgcgcgcctcggattaagagcggttattgcgggaacactcgcaaaccttctcagcgcggcgattgccggcatgtttatttagtaaacgataaaagctccctgcatatgcagggagcttttatgtatgaaaaacgggggatatttgtattgtgtccgaggggaagagcttttatactaagtaaaagaaaaaaagttggaggccgatatgaattcattccgttttaccaagatgcacggtcttggaaacagttatatatatgtaaatcaatttgaagaacagctgccggaagaacggctggctgagattgccgttaaagtgtccagcattcacacgggcatcggctctgacggaatgatcctcatctgtccgtcagaaaaagcgccggtcaaaatgcggatttttaataatgacggctcagaagggaaaaattgcggcaacggccttcgctgtgtggcaaagtatgcatacgaacataagctgacagaagaaacgtcctttttcattgagacgctttcaggccttgtgaaagcagatattacggaagaaaacgggattgtgcgtgaagtcgccgtcgatatgggcgaaccgcgcctcaccaaaaaagagctgccgatgctcggcaatgaagatgaacggacgatcgatgaaacctttgtttttggagaaacggagctttccggaacagccgtatcaatgggaaacccccatattgtttttccggttgcggatattaatcaagcgcctcttacaacgctcggtcccgtcattgaaaaagacccgagatttccggaaggcgtcaatgtcgaatttgtggaaaccgtcagcgccgatgaacttcatttccgcgtatgggaacgcggctccggcattacacaggcttgcggaacgggcgcctgtgcggcggctgttgcatccgtattgaacggtgtttccgaacgaaaccgggatatcaccgttcatttagcggggggcgatcttgtgattaattggcaggacaacgggcacgtgctgatgacgggacccgccgaaaccgtatgcagcggcgtctattatttgtaaacagctcgtttgagaaatacgctcctcaaggtttataatagatatcagcatccgtttttaaaaaaggaggtctacttatgagtgttccagtaactattactgaagcagcggctttgcatataaaagatatgatgaaagagcatgaagaagaaaacgcgtttctccgtgtgggcgtaaaaggcggcggctgcagcggcctgtcttacggaatgggatttgagcacgaaaaaggcgaaaaagacagcatgtttgaacagcacgggatcaccgttttggttgacagcgaaagccttgatattatgaccggcacgatcattgacttcaaacagtccatgatgggcggcggtttcaccattgacaacccgaatgccatcgcttcctgcggctgcggatcttctttccgcacggccaaaaacgccggtacgccggaagagtgctaagggtcagcccgccattctcaggatgaaaaaataggacgcctttcttttcgatggcgcttgcaccattgttaaaaaaggcgtttatctgtttaataaaagcaaaacccgctcaacagaagcgggttttgctttttcaaagaggttattcaattgtatgtttcatcgcattgtacatatttgccgtatgttcatcggctttatcccgtgacatgcgcagccgttccgctgaagaaccgtaaccgatttctagtttgccctctttcagtcctttaaaaatcccatcagcgaattcatccagcggttctccttgagtatgcagccctgctccgcctaaatctgtatttaccgccggaggcgcaacttcaatcacttctacagatgaatcagaaagctgatgtctcagactcattgtaaatgaatgaagcgccgctttcgttgctgaatagatcggtgcaatagcaagcggtgtaaaagccaatcccgaagagacgttaatgacagccgcatcttcttttccggcaaaaaacggagcgaacagcatagacaggtggaagggagcttcaatgttcgttgtgatttctttattaaaatagtcccaattgtccttcgcatccgctttcagcacatgaaaacgatgttgaatccccgcgttgtttactaacacattcacttccggataattttctttcacccaatcaaacagtgatacacgttcagatggaatgctcaaatcactgacataggtaataagatccgggaatgtttcctttgctttttgaagagcgtgcttacgccgtccggtcacgatgactttatttcccgcttttaaaaaccgttctgcgaaagccaatcctattccggcatttccgcctgtaatcagtattgtatttcccgtcagtttcatattaactcctcttttccgattgtttttacttcaacaaacttacgtctcttgaacagagcttttgatataagcctttgtcattgacgacatttcatccagtactgaccgcttgtgtctcctcatcatgtcaagccggagtttaataggactctctccttcaattacccaatcaatatattgcttaaagcctttgatggtcatgcgggtattttttaaacaaatcacgatatcaaggagcggcatttgatctgctgaaaataaccgccggctggcttcatcacgttcaatcagcggcagcagtccctttttttcataataacgtaacgttgattctgtcatattacactttgctgctgcttcacgaattgaacaacatgtcttcgaaagacctccaacagtattttttccttgtcactgggtgatgatacgacttaaaccatgttttaagtcaataaaaaaaatgtgatgaattcagacatatgtcacaaaaggaaatgggcagattttcaataggtttaggagtgacggccttcacaaaaatcctcaaatcaacggttcaaatcatactatttgcaaattcggaaaaaaataaagggtatatagaatcaaaaaatctggaagatgtgctcttagtcaacacgttctaaagtcatatttttcgaaaggatattgattttttgataggaataaactaaattgtaaaagtatagaatagttaatttattttgtaagaaaaggatgataatatgataggtcaattgagcaataaaaaaatatttttaagttcttttttcatcattttgatctgttcattactcttccaattcagtatttccgataaagttctgcagtcgtattattcttccgtcggagaaagtacctacgatatcggggagaaaagtgttcgtacgattgtcatgtttctgcaagggtttatgatcttcacaacttttgtggaaattctgataggcggatttctattattcgttgccgcttttattctcggtacaaaaaaaccgaaaaaaatatatttgcttctatatacactgacttctttaatctcggcatttaaaatgttgattctttcagttgttaactacttaacggctgattcctcgcttatatattctgccggcggcaccagcttgagtctgcagctgctggatccatttctgctcatatcaattgcggctctttatgctgccgcaggaaaactgaccgatctcagtaaaggcaagagaatcattttgactggatgttttgttttattaaaactctttactattttctttaattattttatggcggataaaatttagctcgggagagagtcaattaagctgaattttattataaattaaaaaaacagagtagggagatgttatgatgaacttagtaaaatctaataaaaagtctttcattttgtttggcgtggctcttgctgcagcaacattggtttatgcactattattaacgggaactgaattaaacgtggcggcggctcatgcattctcagccaatgctgaattagcttcgactctgggcatctctacagcagcagctaaaaaagcaattgatattattgatgcggcatcaacaattgcttctatcatttctctcatcggtatcgttacaggcgcaggcgcgatttcttatgcaatcgttgcaacagcaaaaacaatgattaagaaatacggcaaaaaatacgcagctgcttggtaaaatcgaccaataaataattgctctttttgtacaagctgcaaaaagagcctctctcccaaatacatatgtaaggattgaaagtatgatagtcaaacaaattgcggctcttatcaaatataataccctgtcatcgtttcgaaaaagaaaggaagattggggcattcctcaactcaacagcaaactgctgtctgccattattatttctctgttatgtttatatctcgttttcctgggatgcggtgttgtattcgggacaaaactgattcagctgcccctcagcgcatgggggcaatttgttttaatcgccgtttcacttgagcagcttttttgggctgccggcttctttaaagaacatcacaatgcctttctgctggatacgcgcaaggtcattcatcaattaaaaaaggtgcgttttttacagctgttttctgtttttgccggccaggcgatcaaaaaaaccattttcgtatggtatctttttgtttttccggtctttttgtttttatcaagcgcaggcatgaccgggtctgcggcgatcatcgtatttttcttgggcttcgtttattttcttctcaatttatttttatctatgctgttttcttatgttgtttatcttcttacaaatatatggagcaaattgttttacttgaaaatcctgaaaggcattttattcagcgtcagcctgctggttccgcttgcagtcgggtatgccgtttatcttctcgtgtttggggagtataccgcaaaggatatttcaagctttacggagtcaccggctttccggaacatcctcatgaatacgccgtatgtatggttagcattccgctcacattccgtgctcgttttcgctgcggtgtttgcggccgccgtccttttaacggcggggatgtttaaactgtggtcggccacgctgaagaaaatggaccttattccttatatgtttttgacaaacgctgattttgcgccaaagctgaaattatatagaaataacaaaatatttcatgccgtttttcaaaaggatctgctgtttttatcgagaattgacgggttttttatcaggaacttcggcagtatgctgtatttgttcatgctgtttttaggtttttgtattccgcttctatcgcatcactttatcgggtattcggcagccgccatcgtgtctgcggcggttatcattgcgaacttttcgtatcagctcgtcggagatgcgctcaaaacagtattatcagttgacggggaaataaaaaatcagcatctgtttcaccggaatatcaaacatgcgtggcagctggtgtttccgaaagtatgtatttataatctcgccgctcttatctattcgttcatcatcaccattttgattacggtgttttttccgtcttccgcggcgctgacgatttacctgtttattgtgtttttatgttcgggttttttatacagtctcgtccagatttcaagcaccgccctgtatcctaagaaaaactgggagcatctgtacgaaattggagaagcggggaaagcaaagacgtataacaacttatacagttctttcattttcattgtgtcgcttcaaatcgctgcgatcacgtcctattttatctataaaaagccggaacttgaaacgatgcttattcattctgcatcaggtatttttgtcctgttcacactattaaactatggagtcatgtttctgtttcttcgcagaatcaatatggcggaaaggtttgcgaacaatgattaaattagtgaatatacaaaaaaactatagtgaaaaacaggtattgaaagatatttcgtttgaggtgaaaaaaggctcaatctatgctttgctggggactaatggagtcgggaaaacaacgactttgaaaatcatttcgggcctgcttaaaccgacttcaggccgcgtcatgattgacggcaaggaactggattcagaagagggggggcaaatatcggctgatatcggttttgtgcccgaccatgcttttttatatgattacttaacgggagtcgaatacttgcgttttacagcggaaatgtttcaagttccgtctcagcggacaaatgattatataaagaatatgttggagacgctgaagctttctcaagacggaaatcagctgattaaaacttattcacatggaatgaaacaaaaattatcaattgcggcagcgctcattcatcagccaaagatattaattcttgacgagccgctgacgggcattgatttaatcagcggtaaaacgatacggacgttattaaaggagtacgtcaagcagggaaatacagtcctgttatcgactcacctgctggagctggcgcattcgctgtgcgatacgatcggtattatacatgaaggcgtttttgcggcggagtatcagtcatccgagcattcattagaagagattgaagaattggctgagcgtatctatacatgatgaaccgcatgttgccggcaatcagaacgtccgccattccgttaaccgcgtcagtgctgtttttttcaggcggtgtgatcgctgcgtttttttccgatcactttgtttcatcagcgtcttacaacggctcgtcaggcgcggttgaactgctgaaaaacaatgcaatcgcttgtctgtttttagccgcgggtttttttacctttgggttgacctcaatcttttatttattcaccaacgggtttattttaagcggctctattatagaaaatctgcatagcggggttcctttttatcagatttttttactgctaattcctcatggtatatttgaagttcctgcgttattattaagtggcgccattggttttaagggcgttgaattggtcatcaggctgtgtttttctaaggaaaaaaagataatggtttcaatgttcaggcatattggaatattggtgctgcttattatttgtctgctgatcgccgctgccgttattgaagcttacatcacaccaatttttaagtaaaaggggcagaaatcatatgagaagtaaattatcattaatcggtgtgccgattgttatgattatcggttatatcatttctttatcctttgagtggctgtttcctgttcttacttttggggtggcaggactatatctctttatatttgctccggtgcaaaataaattcattcgttacatctttttgtttatttttgtgattaatctgttagccagtgcggctctttatttcggtatttaataaaaaaatgacattcaatatgaatgtcatttttttttatcttcgagcggctctgctgcatgttaaaatctgtcgccgttgaaaatagagttttttacgattacatagtcgacattacggatggcttcgagtgtattgccgccggcgtaagagatggaagattgcagatcctgctccatttcaaccagcgtgtcctgcaaagaccctttatgttcgacatgcatttttttgccctcgacgtttttcttttcgcctttttgaaattcagaagcggagccgaaatattctttgtacagctttccgtcgatttcgatcgtttgtcccggtgattcttcgtggccggcgaataatgatccgatcatgaccatagacgcgccgaatcggatggatttcgcgatatcgccgtgcgtgcggatgccgccgtcagcaatgatcggtttgctcgccgcttttgcgcaccagcgaagcgcggctaattgccacccgccggttccgaagccggttttaatttttgtgatgcagactttcccggggccgattcccacttttgtcgcgtcagcgcccgcgcgttccagctcccttacggcttcaggcgtcccgacattccctgcaatgacaaagctttccgggacatgttctttaataaattcaatcatgctgatcacggcattggaatggccgtgcgcgatatcaatggtaatataatccggcaccagctcctgttctttcagctcccggatgaattcatagtcattttccttcacgccgacactgatggaagaaatcagtccgcgcgctttcatatcccggacaaaagccagacgtttttccggctcgaagcggtgcatgatataaaaatacccgttttccgcgagccaggccgcgatgttttcatctataatcgtctgcatgttggccggtacgaccggaagtttaaacgtgtgtccgcccaacgtaactgatgtatcacattcagatcggctttcaacaatgcattttgcaggaatcagctgaatatcttcgtaatcaaatacattttccatatataacacccctaaaagcgaataatatatttaaataaaattaaaatgttcgtctttttataatgtactttgttttgtcaggaatgtcaaatgatttcatgctgcctcatatgcggtcagcttgtcatccatttgcagtttggttatcatagtagtattggttgttgtaagacatttgttacgatagatagatttgcagaagaagggaggggccggtatggaacaaaaacagcccgggcacagcccgaaagcccagaaaattcaggaccggattattttaggcacgatttgggtcgtgtcggcgcttgtcattgcgctcgttgtcggaaccgtcatgaattatatttggatgtttaaataaaaaagagtctgtgccggtatgacacagactcttttttatattatttttcaaacatgcttgtagaatgcagtggctggacgcgcgctttcgggtccatgtaagccttcgcgttgttcacggctgtcggagcttcgccgaaaccgctggcgatcagcttgactttgccttcatatgtgcagatatctccggcggcaaagaagccttcaatattcgtttccatcgtgcttttgacgacgatggaatttttctcgatatcaagaccccagtttttaatcgggccgagagaagaaacaaagccgtagtttacgatcaggtcatcaatttcaatgatttctttacggtcgcctttcacttcttcgagaacgagctgttcgatccggtcttcaccgacaagttcagcgggaacaaacggtgtcagcacgttgactttagaattatgcaggttttcgacactgtgctcatgcgcgcggaatttatcacggcggtggatgatgctgacttctttggcaatcggctcaagcatgagcgcccagtcaacagcggaatcgccgccgcccagaacggcaacgcgtctgcctgcgaattgattgaggtcgtcaatgaagtagtgcaggtttttgccttcatattgttccgctgattccagctcaagctttctcggcttaaatgcgccgtttcccgcggtgataatgaccgtttttgaataatgcgtttctgaattcgtgacaagcttaaacacaccgtccgcctgtttttcaacagattcaacggcctgctctaagcagatggtctgatcgaactttgccatttgctcttttaagttgttcacaagttcctgggcgcggattttcgggaatccggctacatcataaatatatttttcagggtacagcgcgctgagctggccgccaagctgaggcaggctctcgatgattttgacgctcgcctgtctcattcccccgtaaaaagcggtaaacaggccgaccggaccgccgccgatgaccgtaatatcataaacctttgaatcctcttgcataccaaattgcctcctaattgaaaattgttattaattataacatacaatttgaaaggatgacgagtgccgaaaaccgcccggccgcttcattcttgaaaaaaattgcggccgccgctaagatggggacaaattccaatctgttttttcctgaatgttttccgattcttccggatagtatggtgatatgcagacatgtgcggttttctaaaaaattttatatttcatttcataaaatcccgccaataagctgaagctaatacaaatgttgatttgattatgcgtctaacagcaaaaaaaagaaggtggatgtgatggcattgaataaacccaaaatcgtggttttaggtgcaggttatggtggattaatgacagtaacaaggcttccgaagcatatcggggcaaatgacgccgacattactttggtcaataaacacaattatcattatgaaacgacatggatgcatgaagcgagcgcaggaacgctgcatcatgaccgctgcagatatcaaataaaagatgtaatcaatgaatcacgggtcaaatttgtgcaggataccgtaaaagcgatagatgtgcaaaataaaaaggtgacgctttcacaaggggacatcccttatgattatctcgtcatcgggcttggcgccgtccctgaaacattcgggattaaaggtttaaaagaattcgcttttccgatcgcgaatattaatacgtcgcgccagctgaaagaccatattgagctccaatttgcgacatacaatacggaggccgaaaaacgccctgaccgcttaaccatcgttgtcggcggagcgggctttacgggaattgaatttctcggtgaacttgcgaaccgcaagccggagttatgcagatattatgatatagatgaaagtctcgtccggatcgtctgtgtcgaggccgccccgacggttttgccgggatttgatccggagcttgtcgattacgccgttcaataccttgagagcaaaggcgttgaatttaaaatcggcaccgcggttcaagaatgccgcgcagacggtgtcacagtcggcaagaaagatgaagagccggaagaaatcaaatcgcagaccgttgtctgggccgcgggtgtgcgcggacatccgatcgtggaggaagcgggttttgaaaatatgcgcggccgtgtcaaagtcaaccctgatcttcgggcgccgggacatgatgacgtttttattctcggcgacagctcgctctttatcaatgaagagacggaacggccgtacccgccgactgctcagatcgcgatgcagcaaggagaaacggtcgccaaaaatctgggcggtttgataaaaggaggccagcttgaagagttcaagcctgacattaaaggaacggtcgcctccctcggtgagcataacgccgtcggagtcgtatacggcaggaagcttaaaggcacgccggcgtcctttatgaaaaaggtcattgataaccgctcgctctttatgatcggcgggctgggcctgacgctgaaaaaagggaagtttaaattcttctgaaaacccgcagccgcgggttttctcttcttttaaaaaagagcgctataaaaagcatgtaaaagaaaaaaaagaatgtttccgcttacatgagttgttatgttacatattctgacttggtgcttgacaagtaaatatgatatattatcagaaaattaagaaaaagggtgatccgcatgaaaacgacagcaaaaagcacggcggcgtgtccgttctgctcaggtaaagggtattttcaattgcttcttggcggctccgaaacatgtccctcctgccagggaagcggcaaagagagacgctgatttttccagacgttgacttttttaccgcccccgaggtacactgaaagtgctgtagggggtggatgtttgtgattagtttgccggttgtcctgatctcaatcgtactattttttgtactgtttttcggcataggctttctgttgaacatgctgcttagaatgtcgtggattatggctgttgtctatccgattgtatgccttttcattatcagcaataaaaagatgatcagttacgtgcaggcgccgggggaatcctttcaaagcctgtttcagcgcatcatgtcattagcggttgcggatgtcgtgattttggcgggcggactggcgggagccatcatgtcaggcattgccataaaggcgctcagaaaaagaggatatcaaatgttttaaaccgctttcttattcaagaaagctttttttgtgtcacggcgctttttgtatagcacctcaccgagttgggaacaatgactcggaggagagtgatttcagattgacgataatcagacgcgtattcatgatcgtgctctttttgggcgcatgccatgcgacatacttttctataaccggtgttgaagcaaaggatctgacaaattggatgacggaacatcgcggcgccgttttgaaaaacatcggcactccgtttcaatccttacagaatcagccggaaaagaaggcatcaggcagggtaaagccgctggaagaagcttttgactgggaacgctatccgtcacaaaaagtgacggccaccggttataccgccggagcggaatctaccggaaaatctccgggtcatccgcagtacggaattacatattcaggtgtgaaggtcaaacgcgatttatattcaactgttgcggccgatccgtctgttttcccgatcgggacgattctgtttataccgaattacggttacggggttgtcgccgataccggctcaaaaattaaaggcagccgccttgacctctactttgacaccgtcaaggacgtctataacaattggggcaaaaaaacacttgaggtctacattattaaaaaagggaacggcacagtgaccgaggacgaacttgtaaagctgaacgaaacaaagtcgctgcaagtgttcagaaatcaatacaaaacggtaaaagaataaaaacgcttcagcatccgctgaagcgtttttacataaagaaataatctaaaatcaatgtcagcacaataccggtgacgccgccgaagaacacttcaatcggctgatggccgagcagttctttcagtttcttctgtttttctttctcttccgctttctgaaagtccttcgcttcgctgacaaaccgattaaagtcgatgaccagtttattaatgactgtcgcctgttcacccgcatgccgcctgacacctgtagcatcgaacatcgtaatgacggcgaaaatcgcggcgactgcaaacaggggcgagtccagtccctgttccaaagcgattccggttgacagcgcggtgacggcggcggaatgggagctcggcatgccgccggtgctcgtcacaagagaccagtcaagttttttggatacgataaattgaataggcacttttacaacttgggcaaaaataatggcggcaaaactcgccagtaaaggaaaattcataagtacatccatatgcgacatcctttctgtatctgctgattccgatcgtatcgaaaaactgcagaaaacgcccttagtttggtaaaataaaatcaatgaaaaatgttttttcattataccactttacataacaaatacccacataaggagtgtgtactcatgttttatgcatctgatcaactgcggcatcccgaaacactggtcatcggtctttttcaaaaaagcacgctgaacggatttacgaaggaattggatgataaattagacggtcatctgacccagctgttaaaggatggtgatgtgtccgccaaacgcaatcgtgtatcaaaagtataccctccggctgcgaccggtatgaaacgtatttattttatcggcctgggaagagaagcggattattcgtttgaagatacgaaagaatgctttgcacgagtatttcagcagattcatcaagataaaaaacaggaagtatccgtgttgctcgatacattcgtctccggggaagtgcctgccgccgatgccgctcatgcgctttcggaaagctgtctgcttgcggtttatgaggtgcaggattataaacataaatcgaatgagccggatcaggaactgaaatcagtctgcgccgtgaccgaagaagacctgagggaagtgcaggccggcctgaacgtcggcgcggcatacggccaagggacgaattcagcccgcacgcttgtgaatatgccgggtaatatgctgacggccactgatttggcgtcatatgccgctgagcttgcggcaaaatacgatttcgagtgtgaaattttagaaaaagatgaaatggaagagctcggcatgggcgggctgcttgccgttaacaaaggctcatccgaaccgccgaaaatgatcgttctgaagtatcagggcaaagatcagtgggaagacgtcatcggcctggtcggtaaaggaattacctttgatacgggcggatattcaattaagccgaaaaccggcatcgtcggcatgaaaagcgatatgggaggggccgcctcggtattgggcgcaatggaaattatcggcgaactccggcctgaacaaaacgtgctcgccgtcataccgtctacggacaacatgatttcgtccgatgctatgaagccggatgacgtcatcgtttcgctcagcggaaaaaccattgagatcctgaacaccgatgcggaagggcgtctcgtgcttgccgacggcatcacatacgccaagcagcacggagcctctgtccttgtagacgtcgcaacgttaacgggcggtgtcattgtcgccttaggtaacgaaatgacgggcgccatgaccaatcacgccgcgttttatgaacaggtggcggaatcggcgaaagaatccggcgagccgatctggcagcttccgattacagaaaaggataaaaaacgggtgagaaacagtcagatggctgatttgaacaattctccgggaagagaaggccacgcgattatggcgggggcattccttggtgaattcgcggaaaacacgccgtgggttcatctcgatattgcgggaaccgcgacggcgaataaagcgacatgcttcggccctgccggcgcaacaggcgtcatggcaaggacgttggctgttttgactgagcggtttacgcccgaaagataacagcatcccgctgccttgatgcagcgggttttttgatttccaaaatctttagttgactaaagcgcagaatgtatgttaactttaattatctactacattagcaaactaaaggatttttggagggactcatcaatgaatgctgttgttgtcgcagtattgcttatgctcgtcttaagcctgctgcgtgtcaatattattatagctttaatgatcggcgcgcttgccggcgggctgaccggcggcttaggcctcggagagacggtgaaggcttttacggacggtctcggcggaaatgccaccgtcgcggtcagctacgcgctgctcggagcatttgccgcggcgctgacgaagacggggcttcccgatgcaatggtggaagcgtctgtcaaactaatcggaaaaaaggaagattcgcggaaaaaagcactgtcaaaagtgttaatcgtactggttattttaatcatatcctgtttctcgcaaaacgtggtgcccgttcacattgcgtttattcctgtattgattccgccgcttttaaaaatatttaacgaacttgaaatagaccgcaggctgatcgcgtgtgtgatgacattcggactgactgcgccgtatatcgttctgcctgtcggattcggacagattttccaggggatgctgagagataatatggcgtcagccggtttaaaggtgccgctcagtgatattccgtatgctttaatcatcccgacggccgggatggtagtcggtttaattttatccgtcatcgtcttccggaaaccgaagaaatatgagacgaaggagattgccggactgtcgtcttctccttatacgaaaaaaagcattgccatcgccctgatctccattgccgtgtcgcttgccgttcagctctatctgtcacaagtgctcggagtggaaggtatgatcatgggcgcgcttgccggcttgtttacgctgtttatcagcggagtcatgaagcgcaatgaagcggataagctgatcacggacggcatgattctgatggcttttatcgggtttgtcatgcttgttgcggccggtttttcaaatgtattgaacaaaacgggcgatgtggcttccttggtcaaagcatcaacaggctttatcggtcacagtcaatcattaggcgcgctcctgatgctggtggtcggtttattaatcacgatgggaatcggatcatcatttgcaaccgtacccgtcattacgaccatatttgtcccgctgtgcgctcagctcggattcagcccgatggcgacgatcgccgtaatcggagcggccgccgcggtcggtgatgcgggttctcctgcaagtgacagtacgctcgggccgacgtcaggcctcagcgccgacggacagcaccaccacatttgggatacgtgcgtaccgacatttattttctataacattccgcttgtgatattcggctggattgccgcgcttgtcctgtaaaaaaaggctcccggaaaggggagcctttttgtatgctgagaacatcttacgccggatttctgctgaaccccgtcgctttatgaatagacctgtatacggcaggcgcgattgatgccaataacagtgctaaaacgatatcttttatgaaaaaccatatcatgtaaaaccaggccattccgtagctgatcggagcatgaagccataatttcagcgcaatatacgtataggtcgtgccaatgatataaatgacggcggtaccgatcaaagaggcccatgcataatgcaggcggccgggtttttttgttttttccagcagccatccggctgcaaatgccgccgggatgtaagcgagaataaacccgccgctctttccgataaacggcgcaaagcctgctgagaattgagcgaaaacaggcgcccccgcgagtccggccaatgcgtataccgtcattgcaatggctgcccgtctggcgccgagaagcatcgcggctaacagacaaaagaaaggctgcagcgataacggaattcccgcaacttgcaaaaaaggagccattgatgtaatgttggcgccgacggccatcagggcggcaaacatgccgatcagcgccatatcgcccgcgcgaaggttgcgttgtgtcatttgtttttcccccttacacttgtaccagattagcgtaatcgaagggtgattgattgtcaacaaagatttaatacaggtttactaaatggagggagccatatgtttttcgggaaaacgaaacaaacaaaacagtcggaacggattccgccaaatcaaaatgtcacaacgaagtttcccgtgcttcacgccggaaatgttccttattatgaagatatgtcaaaatggaatctgcaagtgtacgggcttgttgaccgtcctatgctgttaagctttaaagatatcaaagcctttccggaagccgaagtgaaaaatgatattcattgcgtcacgggctggtcccgtcttgataatatctggcagggaatacgcgccaaagacatcgctgagaaagcgggtgtgcacaaagaagcgggattcgtcattctgcacgctgaagagggctggacggccaacctgccgctttctgattttacgcgggaaacatccctgctggcatatgcgcataacggcgagccgttaacgccagagcacggctatccgctcagaggcgttttcccccatctttatttctggaaaagcgcaaaatggctgcgcggcattcagtttacaaaggaaaaccaccccggcttttgggagaaaaacggctaccatatgaggggagatccatggaagaatgagcgctttacatgggattaagcccctatccctatatagttcttaggtaccttattaaaataaggtgctttttttatatcaaaaatccattgactttgtttggcaaaaaacctattatttgaggtgtcttttgatattgaaaatcattatcaatgaggatagataaagtaattgccacaaaggggatgaacacataatggacggaaaacaaataaaccgggggttcgcgccggccggccgatacgcggttccgggcacagaagtaagagaaatgcgctcaaaaggaggccgtacgtatcgtatctttgtctcttttcctcaggaagaaccgcctgcctccggcttccccgtcatctacctgcttgatgcaaattccgtgttcggtacaatggccgaagctttgcgggtgcaaagccggcggcctgaaaaaacaggcgttgttccggcggtgattgtcggaatcggctacccgacagatcagccgttttccgccgaacggcacagtgattttacgatgccgctttctgaatcagaactgccggtgcatccgcgcggcgcggcatggcccgaacagggaggggcggaagcgtttctggagtttatagaagaagaagtaaagcccgcgatggagcgggattatccgatcgacagagacaggcagacgattttcggccattcgctgggcggtctttttgtgctgcaagtgcttttgacgaggccggacatgttccagacctatgttgcgggaagtccgtcaattcattggaacaagcgttttattcaggaaaacgcagaacgtttgtcagaccggctctctgcggaaaatcttcaagtcagtgtattgctggctgcgggagaaattgaaaaaacacataaaagcagaatcccgcagcacgcagaggcgctgtactctttattatccggatttgaagatgatggagtccgtgctgaatacagcgagtttgaaggagagggccatatttctgtcctgcccgttttaatcagcagagccctgcgtttctgcctgaatccgggagggccgcataccccgtattctcccacatgagaaaaaacaggcccttcgaactaaatgcggctgattctaattttctaattgactgcgtgttttgatttggatatgattgtcttgaatcataattgataatgataatcattatcaatatagaaagggaatgataatatggacgcattgggaatgaaagggaaaacggccgttgtcaccggcgccgctcaaggcatcggagaagcaacagcgcttgcccttgctgaacaaggcgtaaatgtggcagctatagatacaaatgaagacctgcttcccgggctaactgacagacttcggcaaaaaggcgtgcaggcgcaggggtttgccgcagatgtatctgacagtgcggctgtcaatgatatcatcgctgccgttgaacgtgacatggggcctattgaaatattggcgaacgttgcgggcgtgctgcggccgggtccggtgcaatcccttagtgatgaagattgggatcaaacattttctgttaatacgaccggcgtatttcatgtatcgcgggctgtaagccggtacatgattgagcgtcaaaaaggcgccatcgttacggtcggttcgaatgcagccggcgttccgcgtgcttccatggcggcttatgcggcgtcaaaagcggctgccgccatgtttacgaaatgcctcggactggagcttgcggcccatcatatccgctgcaacatcgtatctccgggttcaacggaaaccgacatgcagcgggcgctgtggcgggatgaaaacggagcacaggacgttatcagaggttcgcttgatacatataaaacgggaattccgcttcaaaagctggcaaagccttctgatattgcaaatgccgttttgtttctggcctctgaacaggcaagccatatcacgatgcatgatttatgcgtggatggcggcgctactttaggcgtttgatttaacgagaaggagggacaaacatgacaaatcaacatgtattgacggaagtgtctgcaaaagaggtgctggacgcttacaagcccggagcgttctttttagcttccccgaaaaggacgctccttgcagaaggtgtgtttgcaaaagtgccggatgcagacgcggagaatcagctggattcactgcctgaacgcgtaagacagacgcttcttgaggcaaagcaagccggcatcaaacatccgattgcggccggcgccattccttttgacggcagaaaagcttcccggctttttgtaccgaagaatgtccatacggcaggcccgctttcgtttgcggaatcttccgcagaaaagccgcaatccaatacatatgacatccgtcccgttccggagcctgagggctttatgagcggtgtggaacaaggcgtattcaacattacggacggcccgctcagcaaaatcgtgctgtcaaggacgcttcatctgaccgctgaaaaggatatcgacattcctcaggccgtcaagcatttggcgcagcacaacccgcgcggctatacattcgcttcggatgtgacgggaacgtcagaaacaagaaaaacgcttttcggcgcaagtcctgaactgctgctgtccaaaaacggaacatcgattctgtccaatccgctggcaggttccagacctcgcagcacagatcccgccgaggatcagagaagagcggaagaactgctgcaatcagcaaaagatctgcatgaacatgccgtagtcgtggccgccgtggccgccgccctaaaaccgttctgccgtgtgcttgatgtgccggaaaaaccgtcactcattaaaactgaggcgatgtggcacctgtccaccgaggtaaagggagagcttagtgatccgtcaacgacatcgcttgagctggccatcgctcttcatccgacgcccgctgtatgcggaacgccgacggatgcggcgagagaagcgattcaggatatagagccgtttgaccgcaatttctacacgggaatggcgggctggtgtgatgctgaaggtgacggagaatggattatcgcacttcgctgcgccgaagcggaaacaaggtctctccggctctttgcgggtgccgggattgtcgccggatcaaagccgcaggatgaactggacgagacatcggcgaaattccgcaccatgctccgggcgatggggctttaccaagatgagttgtaaaaaaggagggaacggatcgtgctgactggatttacgccatggccggaagaatgggctgaaaaataccgaaaagacggctgctggaagggtgagacgttcggaggaatgctgaaagagcgcgcggctttatacggaaatcaaactgccgtgacgtgtaaagatgtacattggacctacaaagaattagatgaaagggccgatcgtttagcggcggggctgcataagctcggaattcaaaaggaagaccgcgttgtcgttcagctgccgaatatcgctgagttttttgaagtgattttcgcgctgttccgactcggagcactgcccgttttcgcgctgccttctcatagaagcagtgagattacgtatttctgcgagtttgcagaggcgaaagcatacatcattcctgatacgcattcaggttttgattacagggcgcttgccagacaggtgaaagacaaacttccggatttggcgcatgtcattgtggccggcgaagctgaagagtttcaggaactgagcagcctgcatagagagcctgttcagctggaagaggtaagcccggcggaagtcgcttttttacagctttcaggaggcagtacggggctgtccaagctgattccgcgaacacacgacgattacatatacagtttgcgcctcagcgcggaaatatgcggcttggatcatcacagcgtttatttggccgctctgccgacagcgcataattatccgctcagctcgccgggtgtgctgggaactttatatgccggaggccgtgttgttctgtcaccgacgccgagtccggatgactgcttcccgttaattgaaaaagaacgtgtcacgattacagcgctcgtcccgccgcttgcgatggtgtggatggacgcatccggttcgcgaagtgatgatttatcaagccttcaagtgctgcaggtgggaggcgccaaattcagtgctgaggcggcccgccgcgtaaagagcgctttcggatgcacccttcagcaggttttcggaatggcggaaggattggtgaattatacgagactggatgatcctgaagagatcattgtcaatacgcaaggcagaccgatgtcaccttttgatgaggtaagggttttagacgatgacgggcgggatgtcgcccccggagaagcgggacatttgtttacacgcggcccttacacgattcgcgggtattataaagcgcctgaacataatgaaagatcattcacagccgacggattttatcagaccggcgatatcgtcaaactgacggcggacggctatatcatcgttgaaggacgtgcgaaagatcaaatcaatcggggcggcgaaaagattgccgctgaagaggtggaaaatcaccttctggcccatcctgccgttcatgatgcggccatggtttcaatgccggatgattttctcggagagcggtcctgtgtgttcgtcattccgaaaggagaagcgccgaaaccgggagagctgaaagcgtttttacgggagcgcgggctggcggcatataaaattcccgaccgggttgaatttatcgcttctttcccgaaaaccggcgtcggcaaggtcagcaaaaaggaccttcgcgaaacgatcgcccaaaaattgaagcctgctgaaatcaaacaatcttaaaaaaggaagtgtttacattggctataccgtcaattcccgcatatgcgctgccgacagcgtcagatatgcctgaaaataaagtatcgtggacgctgaacccgaaacgcgcggtgcttctgatccatgacatgcagaattatttcgtcgatgcttttgagaaagggaaggctccgatcacggaggcggctcagaatatcaagaaaataaaagagcaatgcaaagcgctcggcattccggtggtgtacaccgcgcagccgggcagccaagacccggcggaccgcgcgctgctgacggatttttggggaccggggctgaaaagcgggccttatgaagaaaaggtcattccggagcttgccccggatgatcaggacattgtcctcacaaagtggagatacagcgcgtttaaacggacgaatctccttgacatcatgcgtgaaagcggcagagaccagctcatgattacgggaatttatgcacacatcggctgtctcgtcacagcctgtgaagcatttatggatgatatccaaagcttctttatcggagacgccgttgctgatttttcttcagaaaaacataagatggccatcgaatatgcgtctcagcgctgcgcttacacggctttgacaaacgaagtgctggagctgctgggcggcgcgccggtttctgaaggagaagggaagacttccgccgtattgacaaaagaccgggtgcgggaacaaattgcggcgattcttcaagaatcaccgtctgatattccggatcatgaagacctgctggacagaggccttgattccgtcagaatcatgagccttgtcgaacaatggcgccgtgacggagctgaagtgacgtttgttgaactggcggagaacccgacgcttgaagagtggtggagacttctttcttcccgatctcaaaaagtcttgccgaacgcagattatttataaagggagagaatagaatgcatgatacacaacagctgcctctgacaggcgcacaggccggtatctggtttgcgcagcagcttgatcctgataatgcgatttacaatacaggcgagtatgttgagataaacggcgcgatcgatgtgaacatatttaaaacagctctcgaacgtgtgctgacggaagccgtgtcattacacgcccgcttcgaagagggagcagacgggccgaagcagatcatcaatcctccatttgaagctgcgatcgatgtcatagatgtgagttcagaagctgatccgaagcaggccgcactcagactcatgcagacagatttggctgagcccgttgatatggcggccgggcctttgttccgcgacattttatttcaggcgggaccggaacgctttttctggtatcagcgcattcaccacattgcgatagacggctacggtttttcactgctggcacggcgtacggcgcaaatatacaccgcaatacgggaaggacgtccggataacgggcgctccttcggctctttggaggaactggtaaaagaagatcaagaataccgcgcgtctgatcaattcctgaaagatcgggaattttggatggagaaatttgcggatgaacctgatgtcgtcagtttggcagaaagagcgccgagaacgtcaacaagctttcggagaagcacggcttatctttctgaaacggctttgcagcatgtaaaagcaattccgaactggcatgaagccgtcacagctgcagcggcggtatatgtccaccggatgacaaacgcaggggatatcgtgctcggtttaccgatgatgggacggatcggctcgatttcactgaatattccgagtatggtcatgaatcttctgcctttacggctttctctccgcccggatatgaattttcatgaggccgtcagccaagtggcaaaagaaatccgaaacatccggcgccatcagaaataccgccatgaagacatgcgccgcgatcttaaattgctcggagaaaaccgcaggctgttcggcccgcaagtcaatgtgatgccgtttgactacgctcttgatttcgcaggagcgccaggcaccgtccataacttatcagccgggcccgttgatgatttgtcaattaacgtttacgacagagcggacggaagcggaatgcgtgtggactttgatgcgaatccggaagtgtacagcgccgaagatattgaaaaccatcaaaaacgattcctgcttctgctggaatccgctgtgaaagaccagacacaaaaaatcggcacactcaaccttctgcctgaaagtgaacgtctctgcgtactggaaagctggaatgacacgcgcaaggccgagaagcagaaaagtctgccggagctgttttacgaacaggccgtaaaaacaccggaccggccggcaatcatcaccgaaaacgaagagctcagctatgccgaattgaacaagcgcgcgaaccagcttgccggcatgctaaaggaaaaggggctcggaccggaacaatttgccgctttgctgcttccgcggtcacaggagttggccgtgagcatgctggccgttttgaaaacgggagccgcatacctgccgcttgatcctgattttccttctgagcggatcacatacatgctcaaagatgcacaccctgcatgcctgattacaacgatggaattatccggccgcatgccggaagacagtgatgcaaaaaggatcattctcgatgacccggatacggtaaaaaccgttgccgctcaaaatgctgactgttccgatcaggcggaatgttcgcctttgcaccccgcttatgtcatatatacatcgggttcaacgggcaaaccgaaaggcgtagtcgtgacattaaaaagcgtaagcaatttcctcttatccatgcgggaaatgttcccgctcggcgcacaagaccgcctgcttgccgttacgactgcggcgtttgatatttccggacttgagctcttccttccgctcatcagcggggcggggtgcgtcatcgcacgtaaagagacgattcaggaaccgcgggcgcttgcgaacatgattcactcatacggtatttcaatcatgcaggcaacgccgacattgtggcattcattagtcaccaatgaacctgattccctccgggcgctgcaggtgcttgtcggaggtgaggcgcttccgaacgcgcttatgcatgctctgcttgaatcaggctgtacggtgacgaatctgtacgggccgactgaaacaacaatctggtcggccgcacagccgcttgcaaaagaccatacaggggcgcctccgatcggaaagccgatttggaacacgcgggtatacgtgctggacgccgcattgcagccagtcccgccgggaattgcgggcgagctttatatagcgggcgaggggcttgccagaggttattataaccgtcctgatttaacagctgaaagatttattgccgatccgtacgggcccgcgggcgcgaggatgtaccggacgggagatctcgtgcgctggcgtgaggacggctcgcttgattatatcagcagagccgatcaccaaattaaaatccgcgggttccggatagaattaggagaaattgagtcagtgctgtcgaaatacccgggtatttcgcaggccgctgttattgtccgtgaagaccagccgggagataagcgcctggcggcttatgctgtcgcggatcagccccttgatatcggcggacttcgtgaatatatgggcgaaagcctgccggattatatggtgccgggcgcgtttgtacagctgaaagaattgccgctgacgccgaataagaagctcgatcgcagcgctctgcctgcacctgatttttcagctgtcctgtctgacagagggccgcggacgccgcaggaagaaatattatgcgatctgtttgccgaggttctcggtctcgcgcgggtcggaattgatgacgggttctttgaattgggcggacattcgctcttagccggacgcctgatgagccggatccgggagacgatgggcgcagagcttggcatcggacgtctgtttgataccccgaccgttgccgggctcgccgcacagcttgacaccgcaaagagtgcgcggcctaagctcaagccgtttgaccggccggagcacatcccgctgtcatttgcgcagctgcgtctttggtttctctactgtcttgaagggccgagcccgacttacaacattccggtgattgtccgcatgtcaggcaagcttgaccaatcagcgctgaaacacgccttttacgatgttgtcagccgtcatgaaagcctgcgcaccgtttttccggaaaataagggatcatctcatcagcttattttacctgctgaagaagcccgccctgtgtttacagtgacacgtgcagacaaaaacgagctccaagacatgcttgccgctgcggcaagatatcggtttgatctcgctaaagagccggccgtccgggctgagctgtttgatcttggtgacggcgaatatacgctgatggttctcctgcatcacatcgcaggcgacggctggtccttgaatccgctcatgcgtgacttatccatagcctatatcgcccggcaaacaggtgaaaaagcagaatgggcgccgctggcggttcaatatgcggattatgcgctttggcagcagcagcttttaggcagcgcgtctgattctgagagcttaattgcgcgccagctggatttctggaagaaaacgcttgaaaatgtaccggatcagctggagctgccgtctgattttccgcgtcccgctgaatcaagctacaggggcggcgtcattccggtcaacatcggccaagagcttcatgcccgtcttctctcacttgccagaaatcagcgcgtaagcctgtttatggtgcttcaatcagggctttccgcactgctgacccggctcggggcgggaaccgatattccgatcggcagtccgatagccggccgcagtgatgacgcattaggagaccttgtgggtatgttcattaatacactcgtactgagaaccgatacctctggcgatccgagcttttgtgagcttcttgaaagggtcagggaaatgaatctcgcagcatatgaacatcaggacgtgccgtttgaacgtctcgtggaagaattgaatccggttcgctcccggtcaagacatccgctgttccaagtgatgctcgcattccaaaatacgcctgaccctgtactcagtcttcctgatatggaaacaagcctgcaaatcagcagtgtcggatcgtccaaatttgatttgacattggaattggctgaacagcgccatgatgacggcacgcctgccggtattgaaggcctgctggagttcagtacggacttattcagaaaagaaacggctgaagcacttgccggacgcctgcttcttctgctcgaagatgccgtatcacatccggataaaccgatcggaagcttaaccattctttctgatgaagagcgccggaagcttttgccggttaaacgggcaaaacagcatattcagcctcggcagacactgcctgaactgtttgaaatacaggccgccgcaaaatcggatgaaacggcggcagtatttgaagagagcggactcacttatcaagagctgaataaaagagccaatcagctcgcgcacatgatgattgcccgcggcgtcggcccggagcagtttgtcgcactggcgctgccgcgttctttagatatgattgtcgggctgttagccgtcctgaagacgggggcagcgtatttgccgcttgatcctgattatcccgcggaccgcatcgcttttatgttacatgatgccaagcctgtatttatgctcaccaaccgtgaaggcgcaagtaagctctctggcgaaaacggcatgccggccttcatcctggatgatccgcagaataaggaaacacttcggcaatatgccgtcacgaaccctgagaatgccgaccggattcgtccgctgagaccgcttcacccggcctatgtcatttacacgtcgggatcaacaggtgtgccgaaaggtgtcatcattccgcacagcaatgttatccggctgtttgagtcgacgcggcattggtatcactttaattctgatgatgtatggacgatgtttcactcctacgcttttgatttctctgtctgggaaatatgggggccgctgctccacggcggacgtctcgtcgtcgtgccgcatgacatcagcagatccccggaagcgtttctgcatcttctcgtgaaagagcgagtgaccgtacttaaccaaacgccgtcagcgttttaccagctgatgcatgcggaaaaagaacacaaagagctggggcatcagctcgcactcagatatatcatcttcggcggcgaggcgcttgagctgagccggcttgaggattggtacagccgccacgcggacaatcagccggtgctcgtgaatatgtacggcattacggaaacgacggtgcacgtcagttaccttgaattagacaaaaacattgccgaactgagagcaaacagcctcatcggctgcggcattcctgatctgaacgtatatgtgcttgatgaccggctggagcctgtgcctccggggatcacgggcgaaatgtatgttgccggagggggcgtggcacgaggctacttagggcggcaaagcctgaccgccgaacgctttgtggctgatccgtacggcccgccgggaacgagaatgtaccggacgggggatttagcccgcctgcggacggacggttctcttgattatatgggcagggcggaccaccagattaaaatccgcggcttccggattgaattgggggaaatcgaagcggttctcgtcaaacatccggatgtcgaggatgccgccgcagtcgtccgtgaagaccggccgggagataaacggctggccgcctaccttgtccgatctgccggcagcaccttggacacgggggacatgcgccggtttgccgaagaaagcctgccggattacatgattccatcagcttttgtccaaatgaatgaactgccgctgacaccgaatggaaagcttgaccgaaaagcgctccctgcgcctgacttccaaacggaggtcaccggccggggaccgagaacgccgcaggaagaaatgctgtgtgagctgttcgcagaggtgcttcatctgccgcgtgtcggtattgatgacagattttttgatttaggcggccattctttgcttgcggttcatttaatgagccgtattcgggaagcgatgggagccgagctcagtatcggaacactatttgaagctcctacggtggcaagccttgctgaaagacttgagtcaggaacgggcacaagcgcgcttgatgttcttcttccgctcagaacggcaggagaagaaacaccgttgttctgtgtccatccggccggcggtctcagctggtgttatgccgggctgatgtcttctttagaagctgattatccgatatacggcttacaggcgagaggcatcggaaaaaaagaaccgcttccgcaaagcttagatgacatggcggctgattatattgaaaaaatccgcaccgtgcagccgaaagggccgtaccgtctgctcggctggtctctcggagggaatgtcattcaggccatggcgacacaattacagagccggggcgaagaggtttcgcttttggtgatgcttgacgcgtatccgaatcattttctgccgataaaaaatgcgcctgatgacgaggaagccgtcattgcgctgcttgccctgggagggtacgacccggacagcctcggggatcagccgcttgattttgacaccgcgctgaccattctccgccgtgagggaagcgcattagccagcctggacgagtcagtgatgatgaatctgaaagacacgtacgtaaattctgtcgggctgttaggaacatacaagccaaagccgttccacggagatgtgctgttcttcagatccacgattattccggagtggtttgacccgatcgagccggatacttggaaaccgtatattactgggaaaatcgagcggtatgacttagactgccgccataaagatatgtgccagccgggcccgcttgccgacatcggcgcgattctggcagagaaattaaacggacggcgtacagtccggtaaagaaaggaaagagatgatatgacaaatccatttgaacgggaagacggttcataccatgtgctcgtcaatgctgaaggccagtactcactgtggccggcctatctggatgtgccggacggctgggaaacccgcctgacgaatgaaacccgccccgtttgtctcgaatatattgaaacaaactggcgtgatatgaggccggaaagcctgaagcggaccgaagctgctaaaatgtaataagaaaagcctgccgttatttcggcaggctttttatgcggacatcagccgttaagctgtgtatgatcacaaaatgtataagggtggccttcttcatccgtgcaccatgactgagacagaaaagccaaaaagaccgcggcccactggtctgcaaactggattaaaataccgccgtcgtgccacgttccgttatccttcttccagcgtgtatcaattgggtttccctgattcatatgaatattatgcatgccgtttgtcggcttgaacccgaaaatcttatcagcgcccggctccggcccgaatttagagccgtaaatatagacggtggctttttctgatttggctttttgcatgtacgtctcaataaagtcatttaagtcattatccggaccggtgacttcatgcggaaggggcaccatgttccggggatcaaacaatccgccgcggacataatccagcgccagctcacgtctggtttcatcaattggggtatatccgtacggaatgttcggcagcagggtgatcgcgcttgcgtcaaaatgatcgcgtgccgcatacagcacctctgattcttttgaacttgacatgacattgatcgcacagcgatagcgcgtatcaggctcgcctagcacctcgacttgaaaatgcggagaatcatcatctgtttcccttttcatatctaacacagtgccttttaatacaccatagtgctgaacagccatatgaatcctcctttttcttccgggatatgaattgatattcgagacagggggccgtttttccttttgtgagaaagaaaaaaggacagcccgctgatcaggctgtcctcttcatctctattaagcttttgcagccgaaccttgcattgctttttcagcaggcacgtagtcatagcctaagtctttggctaccgcttcatacgtgacatgtccgttagccgtatttaagcccgctttaagcgcagggctgtctgcaatggcttgtgccgcgcctttattggcgatttgaagcgcgtaaggaacggttacattcgttaatgcgagcgtagacgtacgcggtacggcgcccggcatattggcgacagcgtagtgaacgacgccgtgtttttcgtaagtcggattatcgtgggttgtaatatgatcaacggtttccacaatgccgccctgatcgatggcaacatcaacaatgacggaacccggtttcatttgtttaaccatttcttccgtaacgagagtcggcgctttggctcccgggatgagcacggcgcagatcagaagatccgcttccgcgacggaatctgcaatatttacagggtttgacatcaatgttttaatctgatgcccgaaaatatcatcaagctgacgcaggcggtctgcgttcaaatcgatcattgtcacatcggcaccgagtccgacagccattttcgcggcatttgttccgacgccgccccctccgatgatcgtgacttttccgcgggatacacccggtacgccggctaataaaattccttttccgccctttggtttttcaagaaactgtgccccgatctgcgcggccattctgccggccacttcggacatcggcgtaagcagcggaagggaacgtccgtccgttaccgtttcgtacgcgatagctgtcacacctttttctgtaagcgctttagctaattccggctctgcggctaaatgaaggtaagtgaacaagaccagaccttgacggaaatacgcatactcttcagccagcggttcttttaccttcatgaccatttccgcatcccatacttgctttctgtcctccagaatttccgcccctgctgatacataatcttcatttgtaaagccgcttccgagtcccgctccggattccacaagaacccgatggccgtttccgataagctgtgaaacgcctccaggtgttaatgccactcgattttcattgtttttgatttcttttggaaccccgataatcatgtctgtttcccccaatgtttgtgtgatgcttcaagtgtagcgcgatttttgcgaaaattctttgtttgaaacagaaaataaaaaaacacggatttgtgaaatttcacgaacccatgctgcgaagtttgatatccaggtaaatcgtaaacttctcattcacattttttaagtcgatttctgcgatctggctgattcttttcagcctgtaattcaatgtattgacatggatgttaagcgctttagcggcggtgttgacattgctgtcggcatcaataaaatgttcgagcgtttttaccatatcggcttggtgctccctgtcatactgctcaagctttgacagggaatagttcatatagccgctgtgcttgcgtttttcatccaacacatcaaggtactgataaatgccgagttcagaaaagctgaaaaggtgtttggtttctctcacaaaccgctctttcgcttttaatacggaaagcgcttcctgataggatcggtaaacgtaagaaatcgattcgtaaataccgccgatcgcaatcgacgcatcctcaattttatatcgttccttcaactgtttttgaatatgaagagcgaagtgctttaaatctttaaaaggctgatcggttttcggcgcggctaataagattaattcatttgaatcaacagtcgccagcatgacatgaatctgctgtgtcgtttcctgcaaatattgcagctgctgttccgtcttttcagtcagctcatcatgtaaacggatgatcatgacgctgaacacggacggcagcgccattccgagcttatgaaacccttcggccatctcggcttcctgataaatatggccggtcagcattttccaaaaaaactcctggccccgctcttcgattttcgttttgcggatctgcaggtgcaaaagcttgttccgcaccgctttggctgccagctgaagtgtcttcagatcttcgtcattgagcttttttttgatctcaagcgcccaaataaatccgagaacctgactgtttttccagatggaaatcgccacgcggttgcttaggcccacctcgtcaatttctttcactttgatcggctggtccgtttttaaaagggccggaatggttccgtctttccacagtttgttgatgactttttccggcaccctccgcccgataatcgtcgacgtccgggcaggatctgtacaatcgctgtgcgtgctgtatgcaagcagtttatgattaacgtcttctattgtaatggggcattgaagaacttcactgatatggtcggcaacatcttcaagcctgtcgaaactgtacttaaatggatcttttggattggtcatctgtatccctactttttcatagcttcatatcttgatcttaccatcttgcttttcagactgaaaggcatctttgcagggaaatagactaggacaataagatcattcagtgaaaacgaaaataataagaaaatcatactattttatttacaaaatgtgtaattatgacgaaaaatccaatatatcataagactcattttgtaaaattaaaacagatttgtttgactgtgccgattggttgtttttataataatgacgttcaaaaaataagtgaattagcccatatttaggctgatgacacaggagggtataaggaatatgtctggattaattcgtgtcacacccgaagagctaagagcgatggctaagcaatatggcgttgaaagtcaggaagtcatgaatcaggttgaccgcctgaaccgcatgatttctgatttgaaaggcatgtgggaaggtgcttcaagtgaagcattcgcggatcaatatgagcagctgaaaccttcatttattaaaatgtctgaattgcttcaagatgtgaatcatcagctcgatcaaacggcaaatacgcttgagtctaccgaccaagatatcgctaaccaaattcgcggataataagatgaatgaagaaacggagcgcctgattcaatcaagaagacggcgctctttctatgtaagggtgatatgaatatgtatatcgatattacaatagatttaacacattataacggcagcgtcttcgatctcagattgtcagattaccattctgtgaaaaaagtcattgatattgcccggcaggctcagcatgtatccgttccgccgcgtgaaggctattggatcagagtggtcaataaagaaacggttttttccggagaacaaaagctatctgactgcggcattacgaacggagaccgccttgaaattttatgaaaggacatggtggaatgacaggtcataacagatcttatttagaaacagaattagacgccgtccgggaagaaaccgaatcaggcttcacgttcaccttccagcgggaaaaaatcaagcttcttgacgggctggaagcgaatgtgattaaagatgccgatcctttttttcaaaaagaggtctcagtttcagaagacgaagtaaccatcacaatcaaacctccttcttcttatcaggctttccgctatataaaaggaaaagataaaaaaagcaggtggcaatttgcctaccgtctcgtccaagccgtgaaacagcataagctgaaacgtctcaatctgattgccgcccctgaaaatatcgtgtttgataaagcgctgacgccttactttcttcattacggcgtaaaggagagccttccgccttatgaggaagatagagaaagggtgttaaaagagctcaaagcctgtgcggcgcttgcagctgacggggcgtacaccttcgatgaatatttgaagtacaaggagacgcttcatttctctcctgaggtgaaaagcgtgttagaggcggagacgattgaagaactggaagaagccattcaaaccgcaatcgattccctcgaagaaagggacaagacatacataaaactgccgaaaaagaaatggaaaatccaaagatacgccggtctggcgcttgccgtcctccttgtgccggcacttctttactccttatacgttctgtttttcgtccagccgaagcaagaggcaattacggaaagcaaccgctattttttaaatcagcagtacagcaaagtcattgacacactcgctaaatacgatgcggaaagcctcccggaatctgtgcagtacgagcttgcttcctcttatgtggcagttgaaaatctgagggaagaacagcggaaaaacatcgggaatctggtcacgctgcaatcagacccgaagcacttcctttattggattgatatcggcagaggggaaaatgaagaagccatcaaaatcggccgcaatcttgagtacaacccgtacatctggctcggacttacaaaatataaacagcaattattagcggatgacagtatgaaagacgacgaaaagcagaaagaactggacgccgtggaaagcgagcttgcgaaggcgaaaaaagaggcggaggaacagcataaagaagcggaggaaaacagtgacaccgccgaagcttccgccggacaagatgaaagcaaacaagacaaagcgaaagataacaaagagaacgacaagaaagatgagaaaaaagatgaaaaaaaataacagcacacatcaaatggccgcatgtaacgatcaggctgtcgtcaggaggttcgccatatgagtctgttatgggtcttttaccgagagcacgtacaaaaggttcagctgtctgaactcccgccctctcagccgattacgatcggtccggatatgaaagatacaatcacggtcggcacacttccgttacggcaaaacgccgcaaccctttatcggaaagaaacagatcgttatgatgttttcctgggaaataactgtgccggcgaattgacaataggaaatgaaatgccctgccggattgaagaagagacgatgcggcttctgctcacccctgaccaggaagaatcctccgtgtactttatcggcgggaaggatgagatcgttttctcatcagaaacagaggaagcggatatatacaaagagccgtcctccgctcaaacaggggctttttatctgcgtaagtcgggaggatgctggtctgtcgtccctgatggtcaggaagtttatgtgaacggaaagcttgcagaagctcccgaaaggctccggacgggagatgagctgctgtggaattttctgcgtgtgaggctgacggaggacgaccttttagaaatcgttcatcacgaaaagcttcaagccggtttaaccaaaacggtaaaaccaagcaccgaaatgaaaaagaaatacccgcaatatcgaagaacgccgcgcatggtctacgatcttcccgaagaccgcgtttcattcagctttccctcgcaggaaagcgaacagaataaccgggggctgtggctcgtcattctgcctcctgtggtcatgctgattgtaatgggggttgtcgctattatacagccgaggggcatattcatccttgtctctttggcgatgtttatgatgactctcattacgtccaccgtgcagtatttccgtgaaaaaaaccagcggaaaaaacgggaggaaaaacgggagcgtgtgtacaagcagtatttagaaagcaaacggaaagagcttcagacgctgtcggaaaaacagctgcacgtgctgacgcatcattttcccccgtttgaaaaaatgaaatatttaacttctgaaatcagcggccgcatttgggagaaatcgctggaaagcagggattttctgatgcttcggctcggaacgggcacggtcccgtcaagctacgagatttcaatgagcggcggagacctggcgaaccgtgatgtggatgacttgatggagcagtcgcagcacatgcagcgtgtgtataaagacatccgccatgcgcccgtgaccgttgatttacaagaagggccgatggggcttgtcgggaaacctcagatcgtcaaaaatgaaattcaccagctgatcggccagctcgcgttcttcaacagctaccatgacctgcgatttgtctttatctttcatgaggacgaatataaggaatgggaatggatgaagtggctgccgcaatttcagctgcctcatatgtatgcgaaaggatttatttacaatgaacagacccgcgatcaattgttatcgtccatttacgagctgctgcgggagcgggatttggaagaggataaagaaaaaaagatctttcagccgcattttgtctttgtcatcacaaatcagcagctgatcgcagagcacgtcattttagaatacatcgaaggccggcatgagcatctcggcatctcggccatcattgccgcggaaacaaaggaaagcctggcagaaaacattcacaccctcgtccgctacattaatgaagatgagggagacattctcattcaacagaaaaaagcggtgcagatcccgtttaagctggacaggcatgaacggacaaacaacgagcggttttcccggacgcttcggacattgcaccatcaggtcggaatgacgaattccattcctgaaacggtctcatttctcgagctgtttcatgcgaaggaagtaaaagaaatcggcatcaggcagaagtgggagacaagtgagtctgcaaaatcgctggctgttccgatcggctataaaggaaaagacgacatcgtctatttaaacctgcatgaaaaagcgcacgggccgcacggattgctggcgggaacgaccggctccgggaaaagtgaatttctgcaaacatatatcctgtcattggccgttcactttcacccgcatgaagcggcgtttttgctgattgactataagggcggaggaatggcgcagccgttccgcaaaatgccgcaccttctcgggaccatcacgaatattgaaggaagcagaaacttcagtatcagggcgcttgcatccattaagagcgagctgaaaaaacggcagcggctgtttgatcaatatcgcgtcaatcacatcaatgactatacaaaactgtataaacagggagaaacggatattccgatgccgcacctgtttttgatttcagatgaattcgccgagctgaaaagcgaagagcctgactttatcagggagcttgtcagcgcggcccgcatcggacggagccttggtgtgcatttaattctcgccacgcaaaagccgggcggcatcattgacgaccaaatatggagcaactcacgctttaaggtcgcgctgaaagtgcaggatgcaagtgacagtaaagaaatcctgaaaaacagtgatgcggcgaatattacggtcaccggacgcggctacttgcaagtcggaaataacgaagtgtatgagcagtttcagtctgcctggagcggcgccccttacatggaagatgtatacggcaccgaggatgacattgccatcgttaccgataccggcttaattccgctgtctgaggtggatgcggatgatgcggcgaaaaaagacgccccggcagaaatagaagccgtagtcgaagaaatcgagcggattcaaaatgaaatgggcattgaaaagctgccgagcccgtggcttccgccgcttgccgaacgtatcccgcgcacgctttaccccgcgcaggaaaaagaccgcttcttcatcgcctgcgttgatgagcctgatcagcaaagacaggcgcctctcgcttacacaatgatggatgacggcaacatcggcattttcggctcatccggctacggcaagtcagtggctgccatcaccttcctgatgaatttcgcggaaggatacacgccggaagagcttcatatgtacatctttgacttcggaaacggcacgcttctgccattggcaaagcttccgcacaccgcagactatttcttaatggatcaaatgagaaagatcgaaaaattcatgatccgcatcaaggaagaaatcgagcggcggaaacggctgttcagggaaaaagaagtcagccatatcaaaatgtacaattcgctcagtgaagaagagctgccgtttatatttatcacaattgacaatttcgacatcgtcaaagacgaaatgcatgaattagaaacggaatttatccagatttcacgcgacgggcaaagcttaggcatttacttcctgctgaccgcaacgagggtaaacgccgtccgccagtcgctgttaaacaacataaaaacgaaagtcgtccattatttaatggatcagtcagaaggatactccatttacgggcgtccgccgttcagtctcgaaccgatcccgggccgcgtcatgatccaaaaagaagaactgtatttcgcgcaaatgtttcttccggctgaagcggaaaatgacctcgagatgttccaggcgctgaaagctgatgtcaaagctttagctgagcgccacgccggaacagccggaccagacccgattccgatgcttccggatatgctgacggccggcgaattttcactccgtctcggcccggaacaagacccgttccgcattcctgtcgggcttcatgaggaaaaggtcagccctgtgtactttgatctgggtaaaaataagcattgtcttattttgggccagacacagcgtggaaaaacaaatatcctgaaagtgatgctgaatcacctgctgcgtgaaggtgcggaacgggtcgggctgtttgactcgattgaccgcggactgtcgcagtatgcgcaggaaacaaaggtcagctatctggacacaaaagaagacgtccggcagtggatcgaaacggcagaagccattttcacggagcgcgaagctcagtatacgcaggccgtcaaaaatggcgatgtgcacaaactcagtttctctccggtcgtgttaatggccgacggcattacaagattccagcagacgatcgacaccgccttacaggacaagctggcgatgtttatgaaatcttacgcgcatgtgggcttcagttttatcccggcgggcaatcacagcgaattctcaaaaggctatgattccttaacgacggaaatgaaacagatccgccacgcgatgctgcttgtgaaaaaatccgaacaaaatgtcattccgctgccttaccaaaggcaggaaccggacattcagccgggcttcggctatttggttgaaaacgggaaggagcaaaaaatccaaatacctttatgttcagcggaaagggaggccgtcagatgaccgaacaacgaaaaagcctgatcaaattaatagccgcggtcgtcatcattctgctgctgccggtgctgtttttccggtttatcggcgatgacccgggaaaacaaaaaatcaacgccacccgccaaatcgcagtcgtgaatgaagatatgggcttacaaacagatgaaaatgaggaagaggaatccgtccatttcggcaaagaagtagcggccgctctcggcggccgtccggattattcatggacggttgtcaacaggagcgcggcagaaaacggtctggcggctaagaaatatgacgccgtcgtttacattccatccgatttttcaaaagacatcttaagctatgacaaggagcgtccgcaaaaagccacgctgacattcaatattcaaagcaacctgaacgccgtcaacaaagaaaaagtgcagcgtgagcttgaagacgcccaaaaatcaatgaataaaaaaatgtcggcattatattggaatttcgtctcacaaaaagtgaacaatgtccgaggcgattttgacaagatcgtcaataaagaatcagagtttcaaaatgtcatgtacaacttttacaagccgagctccaatgacttggcaggtgaaatcaaacggcaaaaagacctgattgacgaactgaaaaaatcaatgaatgaagcgcagggcgcggcaaaagaaaaactgacttcggcagatgaagccaaaaccacgctcaaagactttgccgacacggtcgagcgctacaaacaatatcaagaaaatcagaaaaaactgctgatggccgcgcaggaacaaaatcaaaagcaaatcacaaccggactgaacgccattaaagcacagcaggccgccaaccagttcagcacgatgatgagcgggctctcttcaggcataaaccgggcgcagacacagcttgaccagacgggatcggctctttttgccgcccaacaggtgagagaagcgcaggttcctgatcaggaacgcgggatggcgaatattcaatccaatttactggacaattatttgactcaatataaagcgcaagcaagatttgaaacattgaacagcattcaaacccttatgaaaagggatcggccggcattaaccgttccggaaaaggacccgggtgatgacggctcggatgaaccgaaagaagaagaaaaaccggaagaagaaaaacccggcgatctgaaaattgaccttgacgatcagcgtgacgaattaaaacgcatctccgctgaaatcaatcacatttctgacggattaaaagaaccggaaaaagaaaaaccggaaccggaagaaccgggccaaggcgatgacggtgaaaactccggcgataccgatccgaataacggaacggctcccggagaagacggaaaaacggaagacggcacaaaagaagagcagcctgcctccgataacacaggcgatcaggagccaaaaaccgtccagacctcgacagccgctgaaaacgtcactccgcctgctgatgagccggcggacgatccaaacgattctgaaagggacggcggcacggacatatctgaggcaaaagaaaggctgaaccaagccgcagaacgcattcagcaaattgaaaaagagctggaagagaaacagcagactcataataaagaactgaaaaaacgtctcgatgctcttgatgaagaaatccaaggccttaaaaatcagattgccaaagttgaaaaacgggcagataaattaaaggaaaatttggaagaattggaagaaacgagaaaacaagacttcgataccgtttacagaatgattgtaagaacagaacagaacattctgaactacccgtcattggatagcggccgcaaatctgctcttgaacagatgtttgccgctgacatcaatacaaaaaagatatccgatttaatgagttactataatgatttatccctgtatgaggcgacactctatcactctcttgacgcgggctcgctgcctgatgtgaaaaaccgggtgctgaaagcccagcaaggtgaagtccaaaccgttcttgccatcaaaccggaagaaacggcaagctgggaaaatctgaaaaacaacaaaatgcagactgatgaagacatcagcaatttcattaaaggcatgaccgaattctcggataactacagctcgtatatcagagatgagcaagccggggtgctcgatgagcttgccagcatttcagacagcgcggcgaaagcatccgatcagctggctgaaggcgctgtgcaggaagcggccgcgttcagcggagacggattaaccggaacgatggcgctcggcgctcaggataccgtcggccgtgaagtcctgcaaatgtctgacacgatgggccatctgtcagaacgccagtccggcatcatcagctataccgacaatatgcagcaaagcgtaaatgacgtccagcaaaaagcggacaccctgaacagcaactggggcaaaaacgtcgattccacgaaattgatcagaaatgacgtgtacggcattttagggaacgcgctcgttgacggacaggaaaacggatatgtttatgattatctcgccaatccgcttaaaatcagcggagaggtgccggaagaccgggttcagaatgttccgccggtcgtcattttggtgatcgtcctgatcagcagtcttctgatcggctatttcagctcgtattatcagcaggcgccgcttcttgtcaaaggcgcgctctttgggattttaaacattatggtcggattgatgatcagtctgttcggtctgaatatctattcgcttccggatgatcagacgattaaatggtcagtctttacgattctcctgcttgcggcgagttcagcttttatccgggcagcctttgtcttcagctcaattaccggatggatcgcatcatcagcgctcattctcttttatgtggcgcctttgatcgacctgattatgccgaacttcacctttgacagtccggtttcgaaagtctatatcgatattcaatacggaacgggccatctgtttgcgttgggggtaacggttcttgcgatcattacgctgattgcggcggcgcttccgctcgtcattcggctgtttgcggaaaaaacggaggaaagtgatcagtcttatgaggcgtaacacgttcatggaaaaaggattgctgctgtttgctctctcctttttccttttccttccccaagccgcagccgcgaatgaggaaaatactgatgtcaagccgaatgaatatgaaaagaaagacattgaaattcgtacggactacctgcacgacgatgcctactccgaggaaaaaacggcgcttccgaaagaacagaaggatatcacgtttgatcagccggccgaaaacccggatgacaaactgatatcaaatttgtttacatcgtcagacacggagccgaatacgatcaaagcgcaatcgaaacaactgggtatcacatttgccgagccggcggtgcggcatacctcggcagatatggaaacggaagagaaaaagacttcttatctgcttcccgctatttatgccgtcttgatcctcctcgggattgcggcaatgatctatctgatcccgaaagtcacggcgcaggaaaaggcaaagcggtaaaacggatcgcttgtgtttgcgggaagacagcccgtaaaataagaaaaaaaggaggagtttcatgcagttttttcttataacaggcgcgtcaaaaggcttgggccgggcgcttacggaacaggcgcttcaagaaggagccgaagtcgccgcgctttcaagaacgataagcggggaaaagcgcgaggggctgacagaatacagtgttgatttaaccgatctcgcagataccgggcggcagatgaaggcgattcttgatcaagcagaggagaaggggtactccgccgtcacactgatcaacaatgccggaatggtggaaccgatcaagcgggcgaaagaggcttccgccgaagaattgaaccgccattacacccttaacctgacggcgcccgttttgctcagccaaatgttcacaaagcgcttcgaagcgttcagcggcagcaaaacaattgtcaacatcacatcgggcgcggcgaaaaatccttataaaggctggagcgcgtattgcagctcaaaagcggggcttgatatgtttacgagaacattcgggtttgaacaggaagatgaagagctgccggtccgcatgatatcattctcgccgggagtgatggatacagacatgcagtcggtcatccgttcttcgtcaaaagaagatttccatgacatcgaacggttccgcaatctgaaagaaacgaaaaacctcagaagtcctgaatacatcgccggcgtcattcactcactgatcgcgggcgagccggaaaacggacggatatacgatatcaaagaatttttgtagagcagctttcacgctgctctttttttgtttgtacaatcacttaggggtccggcggcatatgatgaatgaaacaacatataaggggtataagaaatgtatcagatgaattgagtttcttctcgatttatgttaggattctaaaaatatatgaaggaggggtttccatgagaaatgtaacgttaatggatgtcttcacccatccaatcgcacaaaagtatttacagcgttccggtgtcgcccatgcgatcgcctgcgcgtttcatgcataccgtcttgccgtaaaagcaggtgtcagcccggatctggcggcgaaagcggcattactgcatgacgtcggccattatgaatggtacacagacggcaaatgggattatgaaaagtacagaagaaatgatatccatgccattaaaggcgcggaacgggcgcataagctgctcatccggctcggtgaagaaccgaaagcggcgaaggacattgcgctggcgattctgcttcacaccgattcctatctgcctgaaggcgaactggacaagaatacgctccagcaaatcgtgaaacaagcggatgaactcgatgaagaacccggcggacatcaccattaccgccaaatggatcacacggccgcgctcaaacaaatccaaaagcttgatcagttaattgaccgagcccaatatcccataagaagctcagtctaggccactcatgcggccttttccgcttacataactccgcatgctcactaacaccttttccgctccgatagacgtactgtgtcaaagcctttgtccgctgcatatgctgaaggaaaacatagtaaaggggatcagcgaaaatggcccatcaaggaagcccgcaaatcgtctcgttagtggatccttacgtttatcagaccatccataagcttatcggctcaaggtttatcattcaaaccgtcagacgcattgtcagaggacggctgattgatgccactccggatcacatcgccattgaagagacgcatgaccgtgtattttatatcagaaaccgccatgtggtttccgtcatgcctgattataccgaacgcgtgtaacagcccgaaaaggcgcaaaccggaggcggcactatagaaccccggtgcgtcttcttttttgagatacatagatgcacggcggctttttttggtacaatcacagtacaagttcacacgacaataggaggaaaccgcttgttgaaatcaaaggtccatttttggacgctgcaaattttgctcgttttgctcattatttacgtatcaacgaaagtctcgtttatatttcagccgtttttcggttttatcaccactctgttttttccgattttgatctcgggcattttgtttttcatttttaatccgatcgtgcgcctgcttgagaaaaaaatcccccggacattggcgatcctgctcatttatctcgttttcatcggtctgattgcctttatgttcactgccatcgggccgattgtggcttcccaggtcacggggctgattaacaatttccctgattacattcatcagattcaagtcttgacggcgcaattatcccattccaaatggtttacgtggatgatgacgcaggattatgtgtcgatagaaaaaatccagcagtctctgacgggatttttacaaagccttccgcaaaatattacggcaagcctgtcggccgtgttcggcgtcgttacgaatatcacgcttgtcgtgatcaccgttccgttcattttgttttatatgctgaaggacggccggcggtttccgctcttggcggtcaaaattctgccttcttcctaccgggcggaaggtcggaaaatatttaacgacttatatgtcacattggccgcctatttccaaggccagctgctgatttgtctctttgtcggaacggcatgttttatcggatattggatcatcggcctgccgtatgcgttaattctcgggatggtgatcgccgtcaccaatatcattccgtacctggggccgtttctcggggcggcgcccgcggtgattattgcgtttatggattcgccggctaaggcgctgtttgccgttattgttgtcgttgtcgtccagcagcttgacgggaacctgctttctccgcttgtgattggaaaacggctgaatacccacccgctcaccattattcttctgcttatcggagcgggcagtttcggcggcattctcgcaatgatcctggccgtgccggtttacgcggttttaaaagctttcgtcttaaatatcgtccggcttatcaaacttcgtcagcggtcaaagctcgaagacagccgcaagccgaaataaaaacgggcacaactcccggtgcagcgcataaaatgctgtaaagaaaagcggaggtgtgggtatgcctgcaattgtgggaccgatttatattatgagtttagccggagacgctgcagcgagcttcggtgacgtgtttgccatttctcccaaagccgttgaccactcaggcgcgggggcaggggcgtttcattccggagattttgtcaaaattactaataaattcagcaaaacgcgctttgaagacattgatgtgtttgacgaacctgattggtttaacgcgtgacagcctccttttaggaggctgtcgcttttttgtagtataatagaatcagtctttataaaaggggaatgttttatgaaaatcagaaaagcgaatattaccgtgcagtccggaatgatcggtgatgtatatctgcatgaaaataaaaaagaacagcatacccttgtagccgttccggaacttgagtggagcacgatcatttcctatgaggaagagaaaaaggcgctggcgcagcggcttttacaatcattcagcaagctgattgaagaagaacccgccggagagctcgccggcaagatctcccattgggtggctgaaatgtaacgaaaacggtttaccgcgtcccgtccggggcgataattgtaaaacaagctgggagggacaggccgatgagcgacaaaacggttgacctttatttacagcaggggatgtacggccctttgcagacgaaaccggatgaacgccatttatttttaggctcgctgcgtgaaagagtcatcattgccctgacgaagggacaggtgctgcaaaagcagccgtatgaagaagtgaaacaggcgctgaaaagccgaaaagacgcggtgctctatataaacggaaggctcccgtatcatgcttattcaccatatatgaagcttgccgcacttgccggtgtccgaagctccgtcatctcggaccttcaattcgaaacgccgctcggcctggtttttgccgccgattatgccgtgaaccttgacggcatttacgtgcaggatgacatttttcagcgctcactcctgaaatcttaaaagggcaaaacactgtttgtcattttacaatgccaattcacttacaagtggagataggatataatggttttcatatgaatggcggggaggccggctatgaaaaaagcatttatatgcattgattatacgaatgattttgcagctgagaacggggcattaacctgcggagaacccgcgagacagattgaagatacgattgtcagtttgacgcaagcatttatagaaaacggtgattacgttgtctttgcggtagattcgcatgatgcagacgatgactttcatcccgagacacgcctgtttcctccgcataatatcaacggcacggagggcaaagagctgtacggaaggctatcgcctctttatgagaaacataaacacgcaaaaaacgtaaattatatggaaaaaacgagatattctgcttttgcgggaacggatttagagctgaaactgcgggaacggcagatcactgagctgcatcttgcgggcctgtgcaccgacatctgcgttcttcacacggcggttgacgcctacaacaagggctttcagatcgtcattcatcaaaacgctgtggccagctttaatccggaagggcatgaatgggccctgtcccattttaagaacagcatcggagcgcaagtggcagagtaaggaaggggaaaacaattttggtggagcatggttttaaagacgacagtttgtctttacatacagacctttatcaaattaatatggccgaaacgtactggagagacggcattcatgagaaaaaagcgatttttgagctttttttcagaaagcttccctttgaaaacggctatgcggtatttgcgggcttagaaaaagcaatcgaatacttggagaacttcaaatttaccgacagcgatctgaattatttaaaaacggaattgcactatgctgatgatttcattgattatttacgggatctttcttttaccggatctctttacagcatgaaagaaggcgagctcgtttttaacaatgaaccgattatgcgggtcgaagcacccctgattgaagcgcagctgattgagacggctctgcttaacattgtgaattaccaaacattaatcgccacgaaagcggcccgcattaaaggcgttgtcggtgatgaagacgccctcgaattcggaacgcggcgcgcccatgaaatggatgcggccatgtggggagcgagagcggctttgatcggcggcttcagcgcgacgagtaatgtaagagccggaaagcgttttaatataccggtatccggcacgcacgctcatgcgctcgtacaagcgtaccgcgatgaatatacggcatttaagaaatatgcggagacccacaaagactgcgtatttctcgtagatacgtacgatacgatccgttcaggcatgccgaatgcgattaaagtcgcaaaggaattcggcgaccggatcaacttcatcggcatccgcctggacagcggggacttggcgtacctgtcaaaaaaagcgcgtgaaatgcttgatgaagcgggtttcacagacgcaaaggtcattgcttcaagcgatcttgatgagcacacgatattaaacctgaaatcccaaggagcgaaaatcgatacgtggggcatcggcacgaagctgattaccgcatacgatcagccggctctcggcgcggtttataagcttgtcgccattgaagaggacggcaaactgaccgacaccattaaaatttcgtcaaaccctgaaaaagtgacaacgccgggaagaaagagagtataccggattatcaacaagctgaatcaccactcggaaggtgattatatcgcgctttatgacgagcgggtaaatgatcagaaacgcttaaaaatgttccatcccgtccacacgttcgtcagcaaattcgtcactgacttctatgcgaaagacttgcatgagccgatctttgaaaacggcgttttatgctatgataatcccgaaattaccgacatccagcaatacgtgcaggataacctcaaacttctgtgggaggaatacaaacggatcagcaagccggaagaatatccggtcgatttaagcgaagactgctggagcaacaagatgcagcggattcatgaaatcaaaagcaagctgaaacgggaacttgaatagaaaacaaagcggcctttcctatctctggaaaggcttttttgttgtgataatatttttcacatttagacaaatttcgtcaagttatttgatatacttatgttcgaaggccgcatctaagggggtaaatgaatgaaggtgtttgttgcgagacagcctatcttcaacagaaacgaacaggttgttgcttatgaacttctttaccgggagagcgaagagaaccgttattcggccgcggatggagataaagctacgacggatctcattattaacagctttatcaacatcggaatcgaaaagctgactgaggggaaacgctgctttgtgaattttacagaaagcctgatgttttcagatctccctacctcctttgatcctgaccagcttattatcgaaattcttgaggacataccgatcactccggcgctcatctcaagatgcagacagctgaagaaattaggatatacattagcacttgatgatttttacgccatcaatccggaaaatgaagagttagtggaacagctgatgaaatatattgatattttaaaaatcgactttttgcaatcctcgcgtctggagcgcaaaaaaatcattcagacgtacagctgtaaaagtctgatttatttagcggagaaagtggagacgagaaaagattataaacaggcggccatagacggctttcacctgtttcaaggatattttttcagtgaaccgcgtgtcatcagcggaaatgatctgacgtttcattttcattcttactaccagcttttaagcgaattaaacaatgaccagcctaatatacagcgcgtgacggaatacatagagcgtgacgtcagcttatcgtatcagattctgcgttttttaaacggatcgcaaacaagactgaaaaaaaagatagacagcatccagcaggccatcatgatgctcgggctgaatgagattaagcgcttgatttacattctttcattcagagatttaacggcgaaaagccactcaagccaaaaagaaatcattaagatttccttaatcagggccaaactgtgcgaactgctggcgaaaagaaccggaaggccccagccctcttcttacatgctgatcggcatgttttcgctcatcgatacgcttctccacagggaactggaggatatcatcaaagaactgcctttaatcgatgaagtcggacaggcgctgctcggttatgaaaacgattattataagatgctcgcgctcgtcaaagccattgaatgcaacaactgggactgtgacgagtggggaaaagaactgaacaaagaagaagcgtatgaatgttacttacaggcgatcgaatggtgccggcagctgatcgattgagccgctttaagccgaccatctgagggcgatgataaaccggctttgctctctgatcagactgacacggatgccgtcgggattatacgtcacgtcaaagtcatttttgatgccggtctgcttaatgagccgcttgaccgctgcggtgtcagatgattgcgctgcggtgaggatgctgcgcgcaagctcttttgacgccgacagccgcgcaaggagcaggcgcgcatcctccagcatgcccgcagcttcttttgcggacgctgtcaaaatatctgcgtgaaccggggcactgggcgctggatgccggtatggcgcggcgaaaacagggcagcatggatacacataatgcatacggcggcctccttcctgagaaaacattcgttatacatgagtataggcggcgtgataatgagttatgacatgcaaaaagaccacaatgcgggggttgcggtcttttcggtgtttgtcggtggttatgcgacgctgtttgcccattctgttttgaaattgtgacggcagggactatagtccctgccggtttgtcggaaaaccgttgaaaaaacagcagaaccgccagattggtctgctttatcctaaacgtctgcctttgcggtagttatatagtcctgttcgctaaatgccctgttcgggactatggaattaccttggtttgcggtgtcacgcagatacttttacacatacttttcggtgaaaaatcccgcaaaaacgtttacactattagtaacagatcaaatacctaggactcgttcaccatacacaattcattgatctttcaaaaaaaggagtgtggaaacggtggaaaacaaattagaagaagtaaagcaattattattccgacttgaaaatgatatcagagaaacaaccgactcattacgaaacattaacaaaagcattgatcagctcgataaattctcatatgcaatgaaaatttcttaaaaagacttggaaacaagtcttttttttgtgcattttttatccatttcatggataaagtattatacgattgttaaaaaacgaaaaacctgctgtctttcatcacctgcatttagtaaaatagaatgggagggtgaagacaattattgagcaaatgtgtttagatgccgaaacgattaaagagaagatgaaggaaattgtggaggagaaaataaataatccacatttaaaagacacccttcagacttttataaatgaaaaaaatcattttgcttttggtgttcttgcatttaagcattatgtggctttcgatggtgagcattattcggatattacgttattagcttcaggaattgaattgttaattttagcttttgatatttttgacgatatagaggatgaagataacttggataaggaatggatgaagatagatcaatctatctctttaaatgcagccacttctctttattcaataagtcttcaagtgatttgtgagcttaaaacgaactccgattttccccggcttgctatgaaatatgctttaaatgcaatgcaaggtcagcataatgacctcgaaaatttccccgaaactgaagacgaatgtcttcaaatgattaaacaaaaatcaggctcgcttactgcaatgtcagctgtattaggaacaatgcttgcaaatggggagtttaacgaagaaattgagaattattcctataaaattggaattgttaaacagattgaaaatgattattatggtctttttaataaaaatcgtagtgatatcagaaagggaagaaaaacattaattctgttgtatctaaagcgaagatttaatgctgcttcagaaaaaatcttggatttaatgaatgcagaagcaagttaccattcattcctcattgataataaaaaaagccttgaagacctactatttgatgcaggagttagccagtatgtttcaatgttaattaaaatgtacgaggaagaaattacgacaagtataaaagatttaaatataatgttagaactttaatggaggaaattacagtgaagcaagatatcgtacattatcttatggaaaatccacttgtacttacaaagttagcgtgtggggaagctagtttaataggagttccggataaactgttacctgccattgttgagatttttgaaagggacttaagtcaatcaaaaaaatgcaggggaattttttgggaacaatgattgagagagtgagatctattgaaaaaattcattagaaatttttcgattgtattgttattcgtcagtctcttttacgtcgctcatattatatattttactcaaaacggaattttggtaggaacctatgtggttgaaaacaataaccatgaattgcaggttgtaaaactctccaagtctacgtatggtaaatatatgggcttaaaagagggagacaggataattgaaataagcggaaaaacaccgacagaagagaatataagaggtcaatatctagcgaaagctgaacatatgaaaataataaggggtaatagtaaaatagacttacataatactgagtttatttccttaaatagctcttatagtttttttatctatattatcccatgcatattatttgctttaagcatgttatgcattttttatatttataaagttaacagagtaaaagatacttattcagcctttattttgattatttttttattgtgtacatccattgcatatttaagcgcaggtggagtaactagaggatatgaaataaacagatatattaacctttttacatttttgaacgtacctgtattatactttcactttttgtatcaatactttaaagaattaaaattgaaattttcagctggttatgttgtgtctactctctatatattgccggttattaatataataatcgagatattccagaagcattttgccttccaacttgttacgaatattaatttagtaacattttttttggaaatgatggtcgtctatacatccattattttttatggactagtctaccgaaaaaaggatcacttttatttgctgaaagtattacttatatctaataccatagccttttttccgtttacagtattttatattatacctgaggtgttgttcggacagtatatttattctgctatagttacggcaccatttttaataattattccattagctttagtctatcaattcgtggtcaataaaatctacgatatagacttcttgttgggcagaattagatactatggtttcctttccattattccgactattggagttgtatggctgaatatattattcgacagcaaggggaataactttaacattattcaaatcactgtatatgtatttttgatttttttagcggtattttatattaaggagttattagactacaaatttcgcctgaaacgtttttcagaaaaatataattatcaagacagcatatttaaatatacacagcttcttaaaagcgtatcagctttaaaccaagtgtttatgaatcttaaaaagacgatattagatgtgttgcctgtcagtaaggcatatatctttgaaatcagttctgacggagatattctgtattttgataaacagaacagtgaaccgaactggcagccgtataaaaaagaatttgttaaagtctcatcagagattggcaagatttttgaagtaaatcaaggttttctgatgaagattggagaaagaggggcaaactcatacgttctgctttgtttgtcgagcattaatactccgagactgacaagagatgagatatcttggttaaagacattgtctttttatacaagtgtttcgatggaaaacatattgcagatcgaagaactcatgaaccatttacaagacctgaaacaacaaggctcaaacccggtctggctcaaaaagctgatgtttacgatcgaggaaaagcagcgttcggatttggcccgtgatctgcatgattcagtgctgcaggatttgatttctttgaagcgccagtgtgagctgtttctggccgattttaagaaagaggagccttgccagttagaggtgcaggacaagcttcatcagatgaatgagcagatgtcggatgtcattttgatgacccgggagacgtgccatgagcttcggcctcagctgctgtatgatttgggtctggtcaaggcggtatccaagcttgccgcgcagcagcaagagcgtgcgccgtttcatatccgtctgaatacgggccggtttacggcggcgctggatttggatacgcagctgaatttgtaccgcattattcaggaatttctttcgaacgccatgaagcattcacaggcgaatgaggtgctgattatgctgatcagcattcaaaataaagtgattctgcattatgaagacgacggtgtcggctgcaatcaggaagaaggcggcggacagtcgatgagcatgggtctttcgggtattaaggagcgcgtccgtgcgcttgacggacggatgaaaatcgacacaagtgaaggaaacggttttaaagcggatattgaaatggaattgtaaccattttatcaccaaatcgacttggcagaagccaagtctttttaataaaatggaaatgagtgagtaaaagggaggaaaccatgaaaaagatactagtgattgatgatcatccggctgtcatggagggcaccaagacgattctggaaacggacacgaatctttctgtcgattgcctcagtcctgatgccagtgaacaattcgttctccggcatgatttttcagcttacgatctcatattaatggatttaaatctgggtgatgacatcagcggcatcgagctttccaagaaaatcttaaaagagaatcctctctgtaaaatcattgtctacacaggctatgaggttgaagattattttgaagaatccatccgcgcgggcctgcatggcgccatcagcaaaaccgaatctaaagagaaaatcatgcaatacatatatcacgtgctcaacggacagattttagttgatttctcctatttcaaacagctgatgacccagcaaaaaacaaaaacgtcttcttcccctcaaagtgagcaggatcggttaaccccgagagagcgccatattctccaagaggtcgaaaaaggtttgaccaatcaggaaatcgcagatgcgcttcacttaagcaagcggtcgattgaatacagcctgacatccatttttaataagctgaatgtcggctcccgaactgaagcggtgctgatcgccaagtcagataacgtactataaatcttgaagggagaatgacctatgaatctgaacaatacattgctcggcgcactcggtattgaaatcactgaaaacacgccggagagatgcgtggcggtgatgccggtggataagaggacggtgcagcctttcggatatctgcatgggggcgcgtcagcagcgctggcggagactgctgcaagtgtcggggcccagcattttatcgaccggtcgaaacaggcgtgtgtcgggcttgagattaatgccaatcatttaaagtcagtgaaagagggcggaacggtcacggcgatagcggaacccgttcacacaggcagggcaaccattgtgtacgggattaacattttcgatgaacgagaaaggctgatctgtgtttcccgctgtacgctggctgttataacaaaataaacaaacagccggaaccctgaatcgtccggctgtttgtttttacaaatatgaatcttcttttcgtttgatcacaaagtttctgatccctttgtaatcatcctgaacgcttcttttatcaagcgccgctcccgaattgtacgcggccctgcatatgaggtgcgctccgaccggcgccgtcagcaggataaaaatgatgccgagcagtatttttacagaaatttctccggtcagcatccacaagtagcctaacaccccgagcaataccaaattaacgccgagtgtcgagccttttgaagaggcgtgggcgcgcgtatacacatcaggaagcctgagtgtgccgaaagacgcgaccaggcagatcagcgatcccatcagaatacaaacggcgacggcccatttaacgatttcgatcattttcgataatctctcctttctccaaaaacttagcaaaggcaatcgtgccgataaacgataaaatgccgagcagcagaatgatgtccaaaaaggccgatgtgtttaagagaatggatacaagcgcggtcatggcaatcagattaatgccgatcccatcaagcgcgacgacccggtccggtatcgtcggccctttcatgacgcgaatgacgtacagaagagtcgaaaccgccataatgccgagtgataattgcagaataaacgtaaacatcagcggctcacctcctgaatggctttttcaaaagagacgcggatgtcgtggatcgctttctccgcatcttcaatatccatggcgtgtatatagagaatcgaccggtcatcggagatatccatcacgagcgtacccggtgttaaagtgattaacagcgagagcaacgtgatctcccaatcctccgtcaattccgtcttaaacgcgaaaatgcccgggcggatgttcagtttcggcgctataacggttttcagcacgctgacattggccaaatataattcctttataaagatcagcaccagtctgatgactgaccatattttccaaatgtaaaacggccgcgagaagaagcgccggaaaaaaaacagcgccgccaagcctgcgataaatccggttataaaacccgccgtgctgaggctgtttgtgagaaacatccagcaaacagcgagaagaacgtttaataatagttgaaaagccatgccatctactccttcaaaacagcttcaatgtatttttccggattcagcagattctcagccgtctgattgacatacggtgaaacccattcggttccgagcccgaacagaagcgacaaaaggagaaaagcggctgccggataaagaagtccttttgcggaccgtccgcctgcgccggggatttctttttcttcgccccaaaaagccgtcgtaaaaaccttcagcaccgaatagagcacaagcaggcttgatacaagaatcaatacggaaaacaatgtttcccccttatcgaacccgccttccgcgatcttcagcttgcccacaaatccgctgaacggcgggatgccggccaaagatatggctgaaataaagaacatccatcctaaaacgggataacgggtgatcagtccgcccattttatgcaggctggcagtgcctgtcaatgcgataagcgtgccggcaagcataaacagcgctcctttaatcagcatatcgtgaatcaagtaataaaccgctccttgaatggaggccggcgtgttcatggcaatgccgaacaaaatcacgccgacggctgtaataatattgtagatgacgattttcatgacatccgaaaaggcgatagatccgattacgccgaatagcaccgtcagcatcgcaagccacatcatcaattggtgggtaaagcccgtatcgtgaataaagatcagggtgaatactcttaaaatggcatacaggccgactttcgtcaaaagagacccgaataaagccgaaattgcagccggcggggcgtaataagagcccggcatccagaaatacagcgggaatatcccgccctttaaaccgaaaacgacgagaagaaggatgccgatgacggttatcagcccggtctggcccgattcgcttatttttacgcttagatcagccatattcagcgtgcccgtcaccgcatataagtaaccgacaccgatgacaaaaaacgcggatgacacaatgttaaacacgatatacttcaatgattctcttaattgaattttcgttccgccaagcacgatcagcatgtaggacgcgataagcagaagctcaaaaaagacgtacatgttgaacaggtcacccgtcaaaaacgctccgcttacgccagccagaagaaactgcacccctgaataatagaaagcgcgctcccttttttctccgatggagcggaaggagtacagggtgacgagcagcccgattatggcggttgtcaaaacaagcagtgcggcaagctgatccgcggcgagcacaatgccgtacggcgctttccagccgccgagtgtcagcgtctgaatcccgtgtgtgaaaaccgtctgaacgagagcggcgctgatgacgatggagacacaggaagcggcagtgctgaatatccgcatcagcatcacgtgcctgttcataaaaatcagcagcactgcggcaagcagcggcaccagaataggcaatatcacaaagttattcatgttgatcatttcccctcattcgatccatatcgtccgttttcagttcctgataggcgcgaaacgccatcacaagcaggaaggacgtgacgccgaacgaaataacgatcgccgtcagtatgagtgcctgcggcagcggatcgacaaaggacgtgctttttccgcccagtatgggaggagcgccttttttcagtccgcccatggtcaggagcagcaaatggacgccgtggctcaaaagcgcggtgccgataatcacgcgcagcagacttttagaaagcagcaggtaggttgccgccataaacaaaataccggcaatgacagacattaagatttccactattcttcctctccaatcgtttgaataatggtcatcgtcacgccgacaacaacgagatacacacctaaatcaaacaaagtggccgtcgcaagctccgtattcccgagcaccgggagatgaaaatggccgaatgtatgggtgagaaagggcgctccgaataagaacgaacctgcacccgttgcaatcgcgataagcagacccgcgcccgccacataaataaaattgacgggcaaaatcgatttgacggtttttaaatcaaaggccaaaagcagcagcacgatggccgaagacgtaatcagtccgccgacaaatcctccgccgggggcgttatgccccgataaaaataaatagaaagagaaaagcagaatgataaaagatacaagcttcgttgccgtctgaaggatgatgtcgtttgtttttggctgtctcaacgcttttctccctcctctgttacttttgttctgatcatgccgtaaatcccgagtgcggcaatcgacagcaccgtaatttcaaacatcgtgtcaaatcccctgaaatcaacgaggatgacgttgacgatattgtttcctcccccgagcttatggctgtaagcggtgaaaaaggaggagatgctgtcttttgttttttcgctggaagacgcgattccgagcattgtcacgatgacgccgacaccgagagaaatgataaaattcgtcatccggaatgttcttgtcttctttttccgccgcattttcggcagatggtaaaaacaaagaagaaacaaggcgacggatatcgtctcaatgacgagctgcgtgagcgccagatcgggcgctctgaaaatcacgaaaaacagcgcgagtgtgtacccgacaacaccgagtgagataatggccgtcagccgtgatttggcgaacacagtcgcaatcgttgcgttcaccataacgagggacagcacgatttcatacaggccgatctcagccattcctttcgctgtcatggaaaagccgcctttcatgacgaacgccgctccgatgagaatgataaacgacgcaaagatatacagcagataatcccgcaaaaatccggtcatataagatgacgtcagctggtaagatcttttttccatactgcccgtcaccgcatcgtaaagcttgttcagcgtcagttttttcggaaacagaccgtacagacgctcccatttagacagcgttacgtaaccgatcgtgccgacaatgatgatgccgagggtcatcattacctcagccgtcaccccgtgccactgggaaatatggacatggaatgtatctccgccggttaacagagcgggataaatggagttcatcgccggttcaatcaggctgtaagacaaaacgttcggagcaaaaaacagactgacggcgcaagcggcaagaatcaccggcgaaatcagcatgccgagcggagcttcatgcggcgtcttttcaagctgatccgttttgcgcgcgccgctgaacgttctgaaaaacagcttcatgctgtagatgaaagtgaagacgctcccgatccatgcgagaacggggaacagcacgccccacgtatccaggctgaaaatatctgcatgagcaatccgcagcatacttgtaaagaacatttctttacttaaaaagccgttaaacggagggagaccggccatggaaaacgttccgatcagtgaaacggtgaacgttaccggcatgagcgccatcaggccgccgagcctgcggatatcccgcgttcccgtttcatggtcgataatgccggccgccataaataaacttcctttaaaagtagcatggttaattaagtgaaacacagccgcggtgacagccgccgtaaaatactctgaatgctcataatgaagcgcggcggctcctgcgccgagcatcgatacaatcataccgagctgactgactgtggaaaatgccagaatcgcttttaaatcggtttgtttaatcgcattaaaggaagcccataccatcgtgatcagaccgactgaggcaaccgtccaaaaccagacgggtgaaaaagcaaaaaccggactgaatctggcaatcagataaatacccgctttcaccattgtagccgagtgcagataggcgctgacaggagtcggcgcctccatggcatcaggaagccagatataaaacggaaactgcgctgattttgtaaaggcccccaataacaggagaaccatcgccggaataaagaacgggtggcctgcgataatatgcacctggttgaccatttccctgatactgaaagaatccgtcatcagatacagcaggataaagccgccgagcatgcacagcccgccgccgacggtaatcagcagtgatttttccgccccgtagcgtgatttcttccgcttatgccaatacccaattaataagaaggatgacaggcttgtcagctcccagaacatataaagcacgatgacgttatcgacgagcacaacgccgagcatcgcgcccataaacatcagcaggtacacataaaaagggccgagcttttctttgtccttcgataagtaaaaaatactgtaaagcgtcaccaaagagccgatgcccgtaatcaataaagcgaataacagcccgagtccgtcaatataaacggtatagttaataccgagggacggaatccattcggccgcataccggacggtttctccagccattgtgacagggagcttgctgataaagtaaacaaacagcacaacgggcactatcagcacaaaccagcctgtatggacttgttttacccgtttataaagaaagggaacgataaatgcaaataaaaaaggcgccaaaatcgcgaaatgtaacagctgcaacagaagacctcctttgcttgttttttcatcaagcaactgctttatgtaagaatgaatcaatcaattcacggtcataggacccagtacaaattatatcgcacttttttttaccctgctacggcataatgtattcctctttgtgtttttgtggtcttttgaacccaaaataaatttatcaaatatccggatctttgtatatacatttctttttcagatcaagctttacaaaaggagctggtcagatgaagagaaaggcggcggcctgtattggaatattttgttctattattgcaggaacattcatagttgatgatttctgcaaaacgcggcagcagacggaagcagatgattgggagcatttttttctcggtgcggaatacgcagaagacaagctgagtgcggctgaatcaatgcaaacgccgtttcagccgcgtgagtatatcagaatcgtatatagatgaaaagagttccggcaccagggtgcggaactctttttgtgtggcaatcagcgttttcctttaatataagggatgccgttggctttaggcgcatccgcgcggccgatgaagccggcaagcgcgagaatggtcagaatgtaaggagccatcagcatgtatacattcggaatgtctttgaacaggggcaaaagcgagccgataatgctcaaactctgcgcaaacccgaagaacagcgcagccccgagcgcgccgatcggatgccatttgccgaaaaccagcgcggcgagagcgataaagccttgtccggaaatggtggagtgcgtgaaatcaagcgcgatcgtggaagcatacacaccgccgccgagcccgccgaacagcccgctgatcatgacgccgatatagcgcatgccgaacacgttgattcccatcgtatcggccgccatcggatgttccccgacagaacggatgcgaaggccgaacggcgttttgaataaaataaaccaggaaacaaaggccagtacgatggctaaaatcgacgtataatatacgtctgaaaagaaaatctttcctaaaaccggaatatcgcttaacccgggaatgttcgttttgtaaaagggctccgggattttatcagtctgcgcctttccgtaaatcagtttgacgataaacagtgtcgctcctaacgcgagcatattgatcgccacaccggttaccgtctgatcggcgcggaaagaaaccgcggcagccgcgtggatcagtgagaacagtccgccggcaatcatagccgcagccagagcgagccacggagcggcggcgccaagctcgcgtccgaaaaataagttgaacatgacgcttgtaaaggcgccgataatcatcagtccttcaagaccgatgttgacaacccccgatctttcagaaaacacgccgccgagagcggttaaaataagcggagccgcatatacgagtgttgccggaacaataatggataaaatctgcaggaagtccacttacttcgccccctttttcttcaatttatcaaggatgagacggatggcgtagcttgatgccacaaacaaaataataatggcgatgacgatgtcaacgacttcagaaggcaccccggattcaatcggcatatttaatgccccgactttaaggccgccgagaagacatgccgccagaacaacgccgattgccgtgctgccgccgagaagcgcaaccgcaatgccgtcgaagccgacgccggtaaaggcgcccttaaccgccgcatattgaaaggttccgagtccttccatcgcgccggcaagccctgcgaaggccccggaaatcatcatggcgtacatcatattttttctgacgctcattccggcgtattgtgcggcgtgctggttaaagccgacagcccggaattcaaatccgctttttgttttatgaatgataaaccacatgaggactgccgcaaacagagcgatcagaatgccccaatgaaggcgggagtaatctgtcagctgctctaaaaacggcgagcggagcgacgcgctttcatgaattttgtctgttttgtcccggtggtccgtcatgacatcggaaatgagataattggttaaatgaagagcgatataattcatcatgatcgtgacaatcacttcgtggacaaaaaaacgggcttttaaaaatccgggaatcaggccccaaatgccgcccgcagccgcagccgccaataacgaaagcggaaggtggatgtaagcgggggcgtcaaaggaaacgccgacccacaccgcggcggtccagccgacaaggagctgtccttcaaccccgatattaaacaggccggtccgaaatgcgaatgccacggccaatccggacagaatatatggcgtaatctgccggatcgattccccgatgtaatacacttcaccgaaaatgccgctccaaagagccgaatacccgcttacgacattgtagccgctggcgagcatgatgaccgcacccgcagctaatccaaggatgatcgcaatcagcggcacagccagatgagaaagtcgattaatcatgtgttttccccgcctccatttgcttacttcccgccattaaaagtccgagctcctgctcgtttgtttcaagcggattgacgtttgcgatgatgctgccttcaaagatgacggcgatgcgatcgctgagattcattatttcatcaagttcaaaagataacagaagcaccgctttaccggcgtcacgctgctcaatgagctttttatggacgaattcaatcgcgccgacatcgagtccccgcgtcggctgggccgcaattaaaagatccggatttctgtccacttcccggccgataatggccttttgctgattccccccggagagagcgcgcgcaggcgtatattcatcaggtgtcctgacatcgtattcttcaatcaggcttcgcgctttgtcataaatcgtgtgtttatttaatatgccgaaagaagagtagggcttttggtaataactttgcagcacgatattttctccgatcggaaaatcaaggacgagcccgtgtttatgtctgtcctgcggaatatgcccgattccggcttcagtgactttcctgggcggcatattttgcagctgtttgccgtttaacatgatcgtgccggcatttgtttttctgagacctgtaatggcttcaattaattcagactggccgtttccgtcaacgcccgcaatgccgacgatttcaccggctctgacagagagggagagctgtttgaccgcctcaacgccgcgcgcgtctttcaccgttacatcagaaagcgaaagcacttcttgtttcggttcagccggctgtttatccgtcttgaatgacacttcgcgtccgaccataaggcttgccagttcatcttgatccgtatgtgcgacatcaagtgttgtaatgccttttcctttccggatgatggtgacacggtcgcagacttccataatctcttttaatttgtgggtgatgaggataattgattttccttcattgacaagatttttcataatctgaatcagttcttgaatttcgtgcggagtcagcaccgcggtcggctcgtcaaaaatgagaatgtcggcgccccggtagagggtctttaatatttccgcccgctgctgcataccgacggagatatcggcaactttggcttcaggatcaatgtgcaggccgtaacggtcggaaatatcacgcacgtcccgggcggcgcgctgtctgtcaattcggccgaaagttttcggctcttttccgagaatgatattttctgagacggtgaaggtatccacaagcataaaatgctggtgcaccatcccgatgccgagatcgttggctttgttcggactgttgatgtgaacgcgttcgccacgcacccggatctcgcctttttccggctgatacaggccgaataaaacgttcatgagtgtcgattttccggcgccgttttcaccgagaagggcgtgtatttcgccttttttcacttgaagcgtgacgtcatcattggcgacgattccgggaaattccttgcgtatattaagcatttcaatgatataatccaccgatttgtcgctccttttcagagatactttgatgagaaagagcttggcaaaagaaaagctgcaagagatgcagcttttccttcaccgctcttttcaaaaaagagaggggataagcacgaaagtctccttatcccctggttcttactcagccttgaaggatttcaattctttttcagttgaagggatcacgagtccgtccgcgattttcttcttccaatcgtctgttgctttgatgacatcgtcagaaaggttctccttgtgatccgagatgccgactgcatcttgcgccaaaccgtatgttaatgttttgccgcccgggaatttaccgtcactcgcttttttcgttaagtcctccacggcagtatccacttttttgaccattgatgtgagagtgacattgtcttttgttcctttgacttggccttccgcgtactggtctttatcgacaccgataacccatacgttccgcttcggatcttcttttttcagatttttcgcttctgtgaagacgcccgttcccgttgcgccggccgcgtgataaatgacgtcaacgcctgatttgtacatgctttcagccgtcgccttgccgacatcggctttgtcaaacccgcccgcatatttcacttcgacggtcgctttcggatttgcggcttgtacacccgcgcggaagccgatttcaaattttttgatcaattcggactccattccgcccacgaatccgacttttcccgttttgctcgatagcgcagcggccgctcccacgaggaatgaaccttcctgttccttaaatgtaaggctcgccacgttgtcttttttgacaacggcgtcaatgatcgcaaaatgtgtgtctttgcgctgatcggcgatttcgctgatggaatcctgcatcagatacccgacgccgtaaatcaggtcaaagtgttcccgcgctaatttatttaagttcgttgtataatctgcatctgattttgattgaagatagtcaaaaccgcttttgccttttttaagcccgttgtcttttccgaatgcctggatgccttcccaggcggactggttaaatgatttgtcatcaacaccgccgatatccgttaccatgccgacggtaaagtttttgctgccggagccgtttgctttgtcacttgaaccgcatgcgcttaatatggttccggccgctgcgatgagcgccatcgccattccgattttgcgttttttcaaagatataacccccctgtaaaatatggctgtgccgttcaattcagacttgagtccccgtgccggatgcagaatcgaaaaaactttctgataataatgatgagacgtctctctttttcccgccttgagcggctgtctcttccgggttcgggacttatgacttatctgaaaagatctgctaaccaatcataatttatcattttacccgccataaataaatagaaatttgcttattttttaaaaaatatcaattttatgaatcggcttcctcatctggttaaaacagaggaggatcagccgggtcattatccttatatagcatatcaaaaaggaatctcaagccttttgtcacgggatatgacagtaaaaaagcaccgttcacagcgaaacggcgctttttgacattataaatattgtttgatgctgctgacattgccggtgttgatatgatattgaaagacgggtctgccgatcgtgccgtacgccatctctacattcagcacttgtatgtcttccagaaatttaaggtatttccggatggagacttgcgagatttcagtatgcttggcgagatcttccgtggtaaaagagccgtcgccgaaagactcaatgctcgcccagatgagtttaagcgtgctctttgtcaatcccttcggaaggtgaaccttttccgccgcttctttcttttgaaaaagctcggcatccaattctttctgtgtcatgcttctgtgtgattgataaactttctgcttgcgtctgtagtcggaaagagcggtttgaaagcggtcaaattcaaatggtttgattaaataatcgacggcgccgtaccgaagcgtttttttaatgacgtccagctcgcttgcggccgaaatgacgatgacatcaaccgattcattctgcttgcggatttccgttaaaagctcaagcccgttttttcccggcatgtaaatgtcaagaaggatgagatcgatatgatgctcgctcagcacgtgcagcgcgctttgaaaggatgatgcgatccctttcagctgaaatccttcaatctggctgagatagcgcttatttaattcacccaccatggggtcgtcttcaactatgagtacattaatcatcattttcctccttcggttcatacggaatgcgaagactgaaagtcgttccttcattcttttcacttgtcacaatcatatggccttttaaattttctgttgcctgctgggtgaaatagaggccgaacccccggtttgtccctttcgtggaataaccttgttcaaaaatacgggcttggtctgccgcagacattccggctcccgtgtccgtaatctctatgtcaagctggcgatcctgaaaccgcatcgagcacgtaatgttttttttcggcatctgcgccaccgcgtcgagcgcgttgtttaacaggtttccgataatcgtaatgagctcatggatgacggccggatccgccgcattcggaatcaggctgccgagctgaatgtccagatcagcgccctgctcgcgtatgtagctttgttttcccagaagaaaccctgcgagaaccggacttttgacatcacttataatctcgcttgtttccgtcttctgctgaatggcaatgtctttaatgtaagtgccgagatcatcgtattcttttaactggacaagccctaaaatgacatgaagcttattcatgaattcgtgagactgggctcttaatgcgtttgcatacattttaacaccggacagctgttctgctaaatgtttgacctccgttttgtccctgaacgtggcgatcgctccgacggtttgtcctttcagatgaatcggaacttcattaaagaccagctcaagtccgttaatgcggatatctctgtcctgaagcggttttttcgtttcaatcacctgtttcagccggcttttcgggagaatatcgttcacatcttgatcgaccggattagtcggaatacccattttaataaaaagtcgtttcgcctctgcattggcaagcttaatttttccccgcgcgtcaaccgcaaggatgccttccttcgttgattcgagcatggcgctccgctcttccaggagggtggcgatttcataaggctcaagaccgtacataatgtttttgacggtgcgggcgacaatgacggctccgatgacgccgacaaaaatacttacgcagatgatgaaataaagcggtctcaaactgtggctgacgacatcctgtattttgttaagcgaaattccgaccgaaacgacgcccacttgttttttatcttttccatagatcggtacgaaggctctcatggattttccgagagttcccgctgatgtgctcgttttgatatggccgtgcaacgccggctgttcgtctccgccggtgaatttcttcccgattttatttgcgtcggggtgggtgaggcggatgctgttcatatccatcaccacgacaaattcggttcctgtcgtatgctggacatccagtgtataattccggagctctttcagcccttttcttgtttgcaatgcctgcgcgacactcggtgtttccgcgacaagctttgcggtgcgcagcgcggttgtccgttcttcttctttcacgcggtccgcggtctggacgctgatcgtgaaaaaggtgatacaaagtgcgataaggacgacaatacagacgaatatcgttaaccgggtttgcaattttaatgtttttttcataacagccttccttacgtttatcattcccgcgttctactttactccgaaaaagccggtttgtgaagatcaggcccttatttcgtaaaagtgaggaaaaatggaattttttatcttgtcaatgtgttttaagtcctccataataagtgaggtagattacagaaagggactttttatatgaaaaatacttattggacgggttattttccgctcgttgcgattctgctttttagttcgtcattatccatttctacctcgctttatgtcatgaagatacttcagacgctcggcatgtatcaggggatgctggattatttctctgagaaagggatcagactggcgctttttgcagcgttcgcccttgtgtattttatgcttttttcggctttgaagctgattgcaaacacagtgacagagctgtctcttttgtttttcacaaatgaccctgagggggacaatctgaaaaaaatcagattaggctctttaatttatgtaggcggaggaattctttcctttgcgttcgtgcagaatggtttttggattgcggcgttatttgccgttgttacgctcatttatttgattttcatggtgtacagaatctattcgacactctcgatcgtttcgctgatcggttttatattgcttgagattctgttttggtttacttttgttatcggtattttgtacatctttatcaagctttataatagcataatggctagcttacctgtgtaagctagccatttttgttaagacagaaatctgtttttgatctcaggggaggggagcatgcatgcttccctttttccgaaccatttgtaacggcgccgggcgatgaaagaataggctctgtccctgagggggcggggcactgcgaaaaaaaccgctgacagccgccaggctccgcggagatgacgcgaaacctttaacacggctgcggattttttgtatatccgcccgttttcgataaaaatcatgctgtcaaattgttctgtcggaagtccttctgatgccaaaagctcccgggcggtatctgattgcaatgaagcaaatgagattttgccggccggatcgcgtttaatgatgaattgaacggcgccgctgcataagttgcagacgccgtcaaacaaaagcacgcggtccggaagctgagctggtttcaaagcggatcccctccgttatctttaataagctgcctgcagcgtgtttttccagatcgaaagctgagggcttgcgtcatgaaggtattcgacgcttgacggtgtatccttgccgacccatacccccatcgtataagcgtccgtcaggccgacaaaccacatatcgtgatagtcatttgacgttcctgattttccgccgacgtacggagctttaaagttcgctttttttcctgttccgcttttgacgacggctttcatcatttctttgatctgcatgttggtccgcacgctgaatacctgcgccggctcatctttccattttaatatcgtttttccttttaaatcagtcacttttgtaatcgcgtgactcggcgtataaacgccgttgttgccgaacgtggtgtacgcattggtcatttcaagcggcgtcatgccgtttgtaaaaccgcccagcgccgcaggcaggcggtaatccgcgctgaccagcttcgcgaaatgaaacggttcaaggtagctgaacgccttattgacgccgacgcggtccatgattctgatggccggtgtgttgtacgagtatttaaacgccgtttccagcgtaaccgtgccgtatgtgcggttattatagttctgcgggcagtaatccgcactgcagaatttgcttgcgtcaattttgctgtgtggcgttgcgccggtcttttcaatgtaaggtccgtaatcaagcagcggcttaatggatgaaccgggctgtctgtatgcttgataggcgcggttgaaatcatatttatgataatctttcccgcctgaaagcgcgataatctgatgtgtctgatgattaatcacggccgctccgccctggacgcctgcatacggcagattttgattcacttgggcgacgacctggttttgcatatacggattcagcgccgtataaatcttcacgccgtcttttaacaatgtgctgactctgtcggaaagctcactctgtattttttgtttcgcctttccggaagctttttcaagacgtttgtcatagccttcggatgaggaaacaagctgtgtgaattcatcatttacataggaaacatagtcaggatatttatttgttttttcgtttatatcaagcttgatcttttccttttcggcttttttcagctgtttcccggatataacgcctgcttttttcaatccgttaagcaatctgacttgtcgttttttcgtataatcaaaatgcttgagaggatcatataatgtagggttattagggatggcgcagataaaggccatctctcccaaagtgagagatttcagcggcttgctgaaataaaattgtgccgccgaaccgacaccgtatacaccgttattaaaataaatcgtatttaagtagccttctaaaatctcatctttgctgtattttttctcaagctgataggaataggccagctccgtcagttttcggctgaaggtgcgttcatggcttaaatacacattccttgccagctgctgggtgatggtgctggcgccctggtcaattttatgatctttgaaattggaggcggccgccctgaccatccccataaagtcaaaccctttatgctcataaaaatggcggtcttcagaggttaaaaacagctgttttacctcattcggtattttattaaagggcacgatcacgcggttctcatgatcgctgacaatctcagaaacaaggcttccgtccctgtcatacatgtaactgttttgaaccaggttgatcgcttttaaatcaatatgtttatcgagcacctgatcaaaaggcttgatttgttttacctctttgccggaagcaataactgtaaatgcacacaacgggataatgccgagcagcaaaatccatccgattattttacgtaccatggtcactctcttttctcctgatttctagccatatcgtatcattcttttaagaatacgagaaggttaaatttagaagaaatcgtgatcgctgccggtcagcccgcatttgacgctgtatccttttgcagatgtcccgccatccataaaagccccgcgcctataaaaaagagaaaggcggtgacgtagaaagcagccgaaatagaaaaaccgcttgagaccgcacctccgagcagagggccgagcacgtttccgagaaaacgaaagctgacgttatatccgagcacctctccctggatgctgcccggagccctgacgcggatcgcggccgtaatgcaggggagcgtgccgcccatgaccatgccgaacagaaatctgaagactaacagaatggagagggaggaggcgagcgcctgcggaataaaaaacaccgctgatgcaatcaaaagcacgattaagatccggctgtggccgaagcggtcgccgaagtccccccatttccgggcaagcaataagcttccgagtccggtcgctgaaaacgccattccggagaaaaaggctaaattaacaggtccgtgcagctcattgacatataaagcgagcagcggctggatgctgaaattgccggtctgcacgatcatggtaagcaccatcatcgcccaaagcgcgggctggtgaaaaatataggagagcacctgttttctggaataggttttccgcttgttttgtttctcgccgagcggctgctcattcacctgaaataaaacgagaagcacagatgcgaaaatgacaaaagacgtaataaaaaatgtgtacgtaaatccgaagctgtcagcgagcagcccgcccagcatcggtccgaataaagtgcctgacacctgacccatctgcagcgtgccgagcgttttcccggcagtctctttcggcgtctgcgccgaaatcatggcaagcgaagtcggaacaaagcccgttacaaggcccataagcagccggaggacaaacagctgataaacggatgtcacaaaccccatcaataaaatgctgacggcaatgccggtgcctgtgatcaagagaatttttttgtagccgcgcttatcgccgaatctgccccaaaacggggaaatcacaaacgccattaaaaacgtgacgccgaacacatacccgctccatctctgcacatacccgcccgaatgggggctgatcgtttcgatatataacgaaagaaacggaacaatcatggtcatgctggcggaaataaagaaatttgtaatccaaatgacgacgaagttcttcttacggacagaaataacatcaccttctttaattttcgtgtgtctaatcattagtatataggaatgaatccggtatttgtattttcgatgcggatataggaaaattcattatttttagaaaatgaagaaagtttcagaggggaaactgatatactatcataaaatatcatttttgatcggaggaaaggcaggtgtaaaaaagtggatcagcgcagtctgctcattattgattttgaatttacgatgcctgacggaaaatacagcccgcaaaatttctttcccgagattattgaagcggggattgtcaagacggtgaatgatgaagtgactgaaacgttttcgagttatatcaaaccgaaaaaatttccaaagctgacgaaacgatgcaaaacctttctgaacatcacccaaaaagacgtggacggcggaatcacgtttaatgaattcatccgcaaattaaatgagcttgatcctgataaaaactgcacgatcgtcacctggggcaatatggatatgaaagtgttaaagcaaaattgcatgtttaaccacatcccttttccgttcaaaggagaacttcgggatctgtccctagaatataaaaacttctttggcgacagaacattgaccggcctttggaaagcggcggaagagtatggcgataaagggacgggcacgcatcataaagcgctggatgatgcgcggacgacatacaaattattcaagcttgtcgagcgggataaacaatatcttgaaaaaccgaaacccccgacgatcggtgatcgcgtcgatctgactgaactgtttcgacgggccacataaaaaaacccaatcatgccgactgggtcaagttcttttaaaatagtcacgctctaacgcggccaagttggcgagcgaacgttccgcccattctgagccgtccgctgtaagctgatctttcagccgggcagacgccgcttgtaaggaagccgtataatcaggaacttcgccatcaaacggtttgaccatctgatgcggtatgtttgtctgttccccgaatgcaagcgctcttctttcatgaaagaacggaacatccgcctgcttcggatgatgaagatctccttgagcgggatgcgtcagaacggctttaattttcactaaatagtgattgggcctgacgtctgtcacttcccctatgtatgctcctgttttataaaacccttttacgattgtgccgatttcaaacgaattcatagcgttcacctctctctagttattctataaaagatcaacgcgattggctagtgaacagctgccggaagcctgactgaagccgttgtgcccgagtgctcgccgctggtgaaatagacggagccttcatgatgctgaataatcgagaatgtcacggtaagcccgagcccggtgccattcgttttcagcgtataatacggtttgccgagtttctgcagttcttcatcggacatgccgattccgttatccgtaatctgaatgagaatcatctcttcctgtttttggacggagacctcgattcggccgttttcagagggcacggcttcaatactgtttttaatcagattaatgaaggcctgtttcagtttttttacatcgccgaacacatataaatcaggctcgctttgaacagtcacggtcaccgatttaaaattagcataagactccattaaggaacctgtttcctttacaagcagagaaatatcaaacttttctttttcatagtcatcctgcttcgccatatcgagataattcgtaatgatcgtctgagcccggtcgagttcggacagcacaagtttctgatatccggagtgggatttgtcctgaagctgctcgccgctgaacagcagctgcacaaaacctctgacgaccgtaagcggattgcggacttcatgggcgacgcttgccgcaagctcgctgacgacggccattttttctgagtgaatcagccttgcccgcatggacgcattctcatcaatgatctcaatcaaataaatgcacagcaaaagggcgctgacttgaaaaaaaacggatactgccgcctcataataaacggaagatagattttgaaaattgaaaatattggtcgcggaatagatgaagacagatgcggttaataaggcggtttcagtgcagccgatgagaagagcgaaaagcagtttcttccgctttgagaaaaaaggccatttcgtttggagctggatagggatgatgattaaaaaaggaattaaggataagaaaaaaagagcggaaggttcaaaccatatgagctgaaaaaaaacggatgctgcccctgcggcaagtcctgctgcggtaccggaataaagcaggcagacgataatgggaatcagctgcaaaccgtaacggacggaatgaagctcctggatgggaaaagccgtacataataaggaagatgacgctgcaaatacggcgaccagcaggcggttcgctctcggcacaagcaaatcgggcttgctgagccagaagacttgatagagaaaaatagggaataaaataaaagagaagtgaagcaggtaatcctttacaatctccatttatgcgaaatcctttcctatgtaaatatgaatctattataacatctttaccggcaaaaaaagtatttatttctctaaagcgaacgcccttatctcatctgataaaggcgttctttccgctgctaagagagcgctgctttcattctcttaagcccttcttttacggcggcggctgaacagccgacattaagtctcataaatccttcgccgcccggtccgtatttcgttcccggctctaatatgattttcccttttttgagcattctttctttgagctcggcatccgaaaatccgtatccgctgaaatccatccagatcaaataggaagcgtcaggtttcatcatgcggactttcggcaattcttttcttaaaaagtcctcagccaatttcatattcctttcaatgtaaggaatcagtgcgtcaagccaagggcctccctttgtataagccgcttcgattgctgcaaccgcaaatgtgttgaggctggaaatcccgttctgatgcaatgcggcggagaatttcgcccgcttataacggtcgggaatgataatggcggatgcctgaatgccggcaatattaaacgtcttgctcggcgcgacacaagtaatggaaatccgcgcaaactcctcagacagagaagcaaaaggcgtatgcggctttccgtacagcatcaagtcggaatgtatctcgtcagaaacgacggtgacgttatgagcggcgcacagcgatccgagctgcataagctcatcccggctccacgctctgccggacggattgtggggattacaaagaatcatcagcttgacctcagaatcgctcagctttttctcaagatcctcaaaatccatgcagtagacgccgttctcttcccgtaatgggttatgtaaaacctgccgtttgttttccttgatcatctgataaaaaggcgtatacaccggtgattgaatcaacaccggatcgcccggttcggtaaaggcttgtactgccatgctgattgccgtgacaaccccgggactgaacgtgatgcttgcgggatcgggccggtagccgtgccgtgtctcaagccatgaagcgacggcttctcttgtgttttcgtcaggagacgtataaccgaatatgccgtggtcaaggcgggcttttaaggcgtcagtgaccgcttcgggagcgcggaaatccatatcggcaacccacatcggaagtgcatccgatacgccgaataacgcttccgccttgtcccatttcaccgattgtgtgccaagacggttttctcgaagatcaaagttcatgtatgtcactcctgtagtatcattattttgcacagcgtatctatgataaaatagatttgcaaactttattataagcggtgatgaaaatggaagaaagccaagcggtcatggaaatgatgaaaatcattgccaagtgggacccatttaaatatggagaagatttttatgagacagaagccgtcgacatcgttcaggccgtctacagtgaagaccgtgccgacaagctggcagcagccattcaggatatctttgaagcttcatttgagcaaaagctaccgatcgaaggctgccaaaaggccgccgagcagcttctgttcataaaagaaagcagctcctgcaccccttaaaaaccggcggttccgccggttttttttattgaataaattcaaaaatccgttccgaaacaaactccgggcgctcttcgggtacgaggtgtcccgtatccttgagtgaatacagaatggaatccggcaggtcgtcatgaagccgttttccgactgagaccggaacgacccggtcttcttctccccatattaaaagagcggggttttgcactttcttcaaatcctcgggctctaaatcgccctccctgtgtctgatgaaccttgtcatcgctttgaaaatctggcggtctgtaaatggtttttcgtaaccgtcaatcatttcctgatcgataagcgtccggtcgtgaacgacatttaacaggtttttcagcacaccgtcttttgaaagccaatacttaagatacaggtcaaaacaagggaggtgcgtcccgaatataatcgacgggtgcgagcgctttaaataccccgagctgcacagcaggacgattttagaaaaaagctcgggtctgagaagagacgcggataaggaaatctggccgcccatcgaatggccgatgagtgcggcccggctgataccgagcttttccagaagtccgatcagaagcttggcgaggtttgcgtaagtatatacgaaagtccgtgacttttccgattgcccgaaaggaggcaggtcaacggcgataatatcataatggtttctgagcagcgggatcagttttctgaagctgaatgccgaagataaaaaaccgtgtacgcagacgagtgtctgtctgccgggattttcataatgctcgtaatacagttcaactccgtctatcgcggcccgtttaatcggtgaaacagcttccatgagagccttcgccgtcctttctttgttgtaatgtaaaggcttttttgattgtcagattttagttctggtttctttcgggtttttcttagcatttgtcgaaaatcgtgatataatgtcatgaagatttttgataatgcaaaggtgtgaaacgtatgaagctgacggaaaaagaaacagaaatattagaaattttagacgaaaacagccgcgttgatgcggaaacgatcgcgaaaatggcgaacattcccgccgaagaagtcaaaagcatcattgaaaagcttgaaaaggaaaaagtcatcattgattatgcggcgatgatcgactggcgcaaagtcgacggtttggaaggcgtcacggcgatgattgacgtaaaagtcactccgaaacgaaatgtcggctttgatgaagtcgctgaacggatatacagattccaggaagttgaatcagtgtacctgatgtcaggggtgtatgacttatctgtcgttattcgcggcaacacgatgtcagacgtggcaagcttcgtgtctgaaaaattgtccacccttgagtccgtcgtttccacgacgacgcactttatcctgaaaaaatataagcatgacggcaaagtctttgaaagcggagacgatgacaaaagaatcgtggtgtctccgtaaatggaaacgaagacttcttatttatctgactacgtgcagcagattaaaccgtcaggcatccgcaaattctttgatctggctgctacgatggaaggcgtcatttcactgggagtgggagagcctgactttgtgacggcctggaacgtgagggaagcgagtattctttctttagaacagggttatacggcttatacggcaaatgcgggtctttatgaactgagagaagaaatcagccgctatttagatcagcggttcggcctgagttattcgcctgacagtgaactgattgttacggtaggggcaagccaggcgcttgatctcgctgtccgcgccattatgaatcccggagaggaaatgttaattcccgaaccgtgttttgtcgcatatgaatcactcgtgaccctgacgggggcgaagccggtgccgattcagactgtagctgcaaaaggtttcaaagcatcagcagccgattttgaagcggccctgacggacaaaacaaaagcgctgcttctatgctcgccgtcaaatccgactggttccgtctattcgaaagaagagcttgaatccatcgcttccttcgctgaaaaacatgacttgatcgtgcttgccgatgaaatttatgccgagctgacgtatgatgagccattcacgagcatgggagccatccgcggcatgaaggaacgcacgattttgatttcaggtttctccaaagcgtttgccatgacggggtggagactcgggtttacggcggcgcctcccgtgatcagggatgccatgctcaaaattcatcagcacgcgatgatgtgcgcgccttccatggctcagtacgcggcgcttgaagggctgaaaaacggtcaggaagacgtcgaaagaatgaaaaaaagctaccggagacgccgaaacctgattgtggaaacattgaacgaaatcggactcggctgccaccaccccggcggagcgttttacgcctttccttccattcagtcgaccggcatgagttcagaagaattcgcggaacagctgctcattgaagaaaaagtagccgtcgttccggggaatgtattcggcccgagcggcgaaggctacatcagatgttcctatgcgacatccattgagcagattcaggaagcgctcgtcagaatcaaacggtttgttgaaaaaagggcataaaaaaagatacgaacccggttcgcatccaaataaaagggggggaatactagaaagccttcgtaatcatagtataccccctttatctgcgcttaaacatgatgatgtaaaaaagttctctttgcgaaaaacaaacttgtatgatataattttaaattgcgtataatctgtatttaatttaacttaggagttgttatgaatggcagcaaaatttgaagtgggcagtgtttacactggtaaagtaacaggattacaagcgtatggtgcgtttgttgcattagatgaagaaactcaaggacttgttcacatttctgaagtcactcacggtttcgtaaaagacattaatgaacacctttctatcggtgacgaagtacaagtaaaagtacttgcagttgacgaagaaaaaggcaaaatcagcctttctatccgtgcgactcaagcggcgcctgaaagaaaagaaagcaaaccaagaaaaccgaaagcggcacaagtttctgaagaaacatctgctccgcaaggtttcaacacattgaaagataagcttgaagagtggattgaacagtccaaccgcaaagaccttatcaaaaaataaccatcaaaaaaagcaccggatatgtatgttcggtgctttttttatgtttatctgacttccggatttgccgcttcctcgcgggatgtttcttcgttcggcttaaacagcaggccgagattgatcagaccggcgatgccgacaagaccgtaaataatccgcgacagagctgatccttggccgccgaagatggctgctactaaatcaaattggaaaaatccgatcagtccccagttaatagcgccgataatcgttaatacgagacagatacgctgaataacactcatgtaaacaacctcctctataaattcgtgaaacagttatagattgtgacaaagcaaagaatctatgcatactacattctccgccgtgtaaatcacacactgtctcaagctgtacaagtgcctttcccgggaaaccgctgtctgtaaaccgtgtgatgtgccgtcaaaaaagcggattgctttacattgaacgtcaactttctgcataatataaatccaaaggaggagatgtcatgcaaaactttacatattggaatccgaccaaattgattttcggaaagggagaggtcgaaaaacttcctgaagaaatcaagccgtacggaaagaacgtactgctcgtatacggaggcggcagcattaagcgcagcggtctttatgatcaagtaaccgacctgctgaaaaaagcaggagttaccgtacatgaattggcaggcgtagagccgaatccgcgtgtctcaacggtgaacaaaggtgttgcgatctgtaaagaaaacagcatcgatttcttattggccgtcggcggcggaagtgtcattgactgcacgaaagccatcgcggcgggcgctaaatatgacggcgacgcgtgggatatcgtcacgaaaaaacaccagccgaaagaagcgctgccgttcggaacagtgctgacacttgcggcgaccggttcagagatgaactccggatcagtcatcacaaactgggagacacaagagaaatacggatgggggagcccgctcgtttaccctaaattctctattctcgatccggtaaacacatttaccgttccgaaagaccacaccatttacggcatggtcgatatgatgagccatgtgtttgaacaatatttccaccacacgtcaaacacgccgtatcaggaccggatgtgtgaatcgcttctgcgcacggtgattgaaacagcgccgaagctgatcaacgatctggagaactatgagcttcgtgagacgattttatatacaggcacgatcgcattaaacggaatgctgtcaatgggcgcaagaggggattgggccacacacaacatcgagcatgcggtatcagcggtatacgatataccgcacgccggaggtttagcgattctgttcccgaactggatgagacatgtgctcaaagaaaatccggcccgctttaaacagcttgccgtccgtgttttcgatattgacgagacaggcaaatcagatgaagagatcgcacttgaaggaatcagcaggctgtctgaattctggacgagcctcggcgctccgaacagactcgctgattacgatatttctgatgagaagctggatacgattgcagataaagcgatggcaaacggagcattcggacagttcaagtcactgcagaaagaagatgtgcttgcgatactgaaagcatcattgtaataacataaaggggggcggccggattggcagctcctttttttctgtgttatagtaattcccttacgatttttttggaggtcatgataaatggagaactttacgtactgcaatccgacgaaactgattttcggaaaaggtcaaatcgaccaattgaaaaaagagctgaagcaatacgggaaaaacgtgctgcttgtttacggaggcggcagcattaagcgaaacggcctgtatgaccaagtaacaggcattttaaaagaagaaggcgcagccgttcatgaacttgcgggcgttgaaccgaacccgcgtctggaaacggtaaataaaggaattgagctgtgcagacagcatgagattgatttccttctcgcagtcggcggcggaagtgtcatcgactgtacaaaagcgattgcggccggtgcgaaatatgacggcgacgcatgggacatttacagcaaaaaagtaacggcgcaggacgcgctcccgttcggcacggtgctgacgcttgcggcgacaggctctgaaatgaaccctgattccgttatcacaaattgggaaacaaacgaaaaattcgtatggggcagcaatgtcactcatccgcgtttctccattttagatcccgagaatactttcagcgttccggaaaaccaaaccgtatacggcatggtggatatgatgagccacgtatttgaacaatacttccacaatgttgaaaacacgccgcttcaggacagaatgtgttttgcggtccttcagacggtaattgaaacagcgccgaaacttttggaagaccttgagaactataagcaccgcgaaacgattttatacgcgggtacgatcgcattaaacggcacgctgcaaatgggctatttcggcgattgggcttcccatacgatggagcacgccgtatcagcggtttatgacatccctcacgcgggaggacttgcgattctgttcccgaactggatgagatacacgcttgatacaaatgtggaccgttttaaaaacctcatgcttaatatgtttgacattgatactgaaggcaaaacggataaagaaattgcgcttgaagggatcgataaattgtccgcgttctggacaagcctcggcgcaccgtcccgccttgcggattatgacatcggcgaagacaagcttgagctgatcgcagacatcgccgcaaaagaaatggaatacggcggattcggcaatttccaaaaactgaacaaagatgatgtacttgccatcttaaaggcgtcactgtaagatacattcccggccggagtgattttcaagctgcagatgtaaccgttttgggagtccctctttccggattttctattagttcattaggagcaagtgaaacacccttttccatgagacaactatggaaatcgtttcatccgtaaaggaccaattaactttgcgattgtctgtcatctatttacacgaaatctaaatcacgaagatgaagagccgcgaatttaaaaaaggggcgctgattcaatcagcgctcctttttatgcattttgtgtactaaggtcccgctgcgcccccatatagcttcccattaagttttgataaccgggaagatgactggagactaatgcgccaaaaccttcaacatcgttgcgccaatcacgctgaagctcgcatgctgtgctgaaccagttcataagctgcacgccgccatgagccatacgggttaatgatgcatctgctacttgcttattaaacgtccccgaagcatctgtcacaacaaacacttcgtagcctgctttaatggcagaaagcgcaggaaaagcaacgcagacgtctgttaccacccccgcgataatcagctgttttttgccggtcgcttcaatggctttaacaaagtcttcattgtcccatgcattaatttgtccgggacgggctatttttggcgcatcaggaaagagatcaacgagttcttgcatgagcggtccgttgggtccattttcaaagctggttgttaaaataaccggtaaatcaaagaatttagccgtatcaccgagagccaatacattgtttttaaattcatcaacgccatagtcacgcacgagaccggaaataaggccggtttgatggtcaactaaaagcacggcagaatcatcttttgaaagacgggaataaagatcagacattttatcatcctccttgaattaaggcaagtcagtttgtcaatggaaaacggtaaatctattcatatactgtataggtagaaagttatttctgaagtgacttttcgtgaaggtgatgatctttcaattaatccggaatgggaaccggagcatgatcaatccaatggatgaactgttgtaaatagcgttgaagataacgttttgtttgttcatccgtaagtatgtgttgagcggaatcaattttctcatggacttgcgaaatcagcattttttgaaagggcagaacattgacttgcatagcttcgagtacttctctcgtttgcatttgaccaaaagaggtgccgaaccctccgggggttgcgccgattaagccaaccggttttctgtttaaaacggaagaggtccgcggtcacgatgcccagtccaatgcattttttaatacccccgggattccggaattgtactctggacttacaatgatgacgccgtcaacgtctcgtatatcagctctaaaggatgttacggagtctggtgctccggccatttctaaatcttcgttaaaaaaaggaagagtgtctatttcaacccagcgaaattgagccgcattatcgaagtcaatcaatgattgagcaatcactcgattatacgagttttttcgtaaacttccacaaataagaccaatggttttagtcaaagaatcacctcccggtttaaaattattttcatcttaacatgataacccaaatatagacactatttttaaaaatggacatttataccttaatatgcctgcttagcagcctctcaagaggagtactatataaaaagaaccgtcccatcggtattggcgatggatgtcaacctgctccaaagtaaaggtgatacgttcctggatcaccaacattcgattcgttacctctttcacgattattacaaatataactatttcgaatccgggatattgtataaaaaatgagcgcatcttcagcgcaaatcccgtattcatcatgccttcttcatgacttgatttagcgggtgagttcatataaagtgaaagagaaaacaattcaccgtgatggagggacaagcaaatgacgcatgtacgctttgattactcaagagcgttaccttttttcaatgaacatgaacttacatacgcacgtgatttcgtaaaaacggcacaccataatatccatgaaaaaacaggcgccggaagcgactttttaggctgggtggacctccctgaaaactatgataaagaagaattcgcgcgcattaaaaaaagcgctgaaaaaatcaaatcagattctgacgtgcttctcgtcgtgggtatcggcggttcatacttaggcgcccgcgcggcgattgaagcgctcaatcattctttctataatgttctgccgaaagataagcgcaaaaaccctcaagttatctttatcggcaataatatcagctcaacttatatgaaagatgttatggatcttttggaagacgctgatttctctatcaatgtcatttctaagtcaggcacgacgacggaacctgcaatcgctttccggattttccgcaaacttcttgaagaaaaatacggaaaagaagaagcgaaagcgcggatttacgcgacaacagataaagaacgcggcgctttaaaaacgctttctaatgaagaaggcttcgaatcattcgttattcctgatgatgtcggcggacgtttctccgttctgactgcggtaggccttctgccgattgcggtaagcggggctgatatcgatgaaatgatgaaaggcgctcttgatgcaagcaaagacttttccagctcggaattagaagagaacgcggcttaccaatacgccgtcgtccgcaacgttctgtataataaaggcagaaccattgaaatgctcatcaactatgagcctgcgctgcaatactttgctgaatggtggaagcagctcttcggcgaaagtgaaggaaaagacgaaaaaggcatctatccttcttccgctaacttctcaacagaccttcactctctcggtcaatacgtgcaggaaggcagacgtgatctgtttgaaaccgtattaaacgttgaaaaaccgaagcatgagctgacaattgaagaagcggaaaatgatctcgacggcttaaattatttagccggcaaaacggtcgatttcgtcaacaaaaaagcgttcgaaggcacgatgcttgcccatacagacggaaaagtgcctaacttaattgtcaatattccggagcttaacgcatatacatttggatatctcgtttatttctttgaaaaagcggtggcgatgagcggttatctgctcggagtcaacccgtttgatcagccgggtgttgaagcctataaggtgaatatgttcgcgcttctcggcaaaccgggctttgaagagaaaaaagcagagcttgaaaaacgccttgaaaaataaaaagaagggctggccctcagcatgacgggtcagccttttttaaaccgtgaaaggtgtgatgatgaattgatgcggcttttatgtaagcatgtcttcatttccgtctgttccgccgctatcgtctattcggcactaaaactgtctcccgaatccctcttgcaaaccatcctgtttttcgctttccctctcggcttgtttacggacatggtccggctgaaactgaagattggccggatgcatacgctgatcacgaagtgctgtctctatgccgccgttttctatatttcaacggaagccgctctctccgcaattgtgacgtatgttctgattgaatgcgccgtcacctcttttcagcgtctgtctgccgctcccggttcttcccggacgccgtatgaagataccgcagagcggggacgctaaagacaaaaaggagcatatgcacatgatcagcataccatcttcacttgaaggtcaatcgtttttactccgcgaactggaacaggtgatgaaaccgatcggttataccatcggaggcggctgggagtatgaccgcgggttctttgattacaaaatttccgatcaggacggctatttatttctccgtatccctgttgaagcaaataagggacacctggatgaacggggggccgccgttacaatcggcacaccctttttgctgaggcacgtttatcagcaggaaacggatgatgcagcaggcggcggtgtttttgagtcattattcaaccaattctccgaaccgaaacggcgggatgcggcaattgaccgctcatatacagatatcggcatctcgcttgtgaaagagctggaagacgtcctgctgcattaaagagccaaaaacagatcagtatcgagcacctggtatgacaggggaggggtcagcatcggcccctcttctttttgtatgccgatgatcgtggtattccgtctgagataatagagcgcgcagtcatgataagatgagccctttagttcctcggggacgggaatgatgcgcacctttttctccagcgtcagatctgacagcgtttgcggtttggcaagctgcagcttgacccggtaatgctcaaacatcacccggctcgacaggtgtgatgtgcacagaatcttattggctcctgcgcgctcggcgtttttgacataccgttccgttaaaatttctacgatacaataaacagacggatgcagccctttgatggcgagaagcgttaataccgacagcatatcagcttcggattcatttttctgctggtccgctgtcagaatgacggtatcagcttccgtaatattcgccttattgagcgtgctgtcatcagcggcatgtccgcggatgaaatggacgttttcaataagcggaccttcccttaatgaatcatcaatcaggacgacagtttttgacggtgcgatgtgctgcagctctttcagcagcatatgcgatttttcgttccatccgataagaatgacgtgccccttgcctttaaaggcgaccttcccttcgacatagcggtgctgtttgctgaacacggctgaagaaagcgtggcgaaataggcggtcacaaaactcgctccgcttaatacaagcaccatgccggcaatctgcccgagcggcgtctgcggaacgtaatcgccgtagccgactgtggccaccgtaatgaccgcccaccaaaccccttcaaacacagacgtgaattgcttcggttcgagcatgtaaatgagttggccgaacaataaaatcaaggcgataatgatcagcccgatccgaacatataacggccatctcagccaggaaataaaaatacggtttgatttcattcgtccggctcttctttcgacagagagatggataaaatctgcttaataatggtgtttagtttttcgtccagctgttcctggccgtatgagtcacgcgcatgtctgattaaatcggccgtctcatcttcaaactgaatgagaggttcgtcgttttctgattcattatagagctggatgaaggcgtcaagcccttcgttcattctgtctatcgcattgctcagctgttctttctcgccatttgtcactttcatgtcgatcacacctgtatctttttttatacagtatgtcccagttcgtttgatgtctttcaaaaatcgccgaaaacatattcacccttattttttcatatgataaagaaagcggaccgaaaaagggtgagtcaaatgacggtcattcaaaaactgttggcggcgctggccggagcgcagctgcttgcttcggcggccgtattgcttattttcgatttgaatggatacaatcacatgtccggcggattttcatggcttgtttttgcaaaagagaccgcaggcacgtttccgttttacatcggaatggccgggtgtatcctcatcatgctcggaggattgattcctgtcagaaaaaagaagcggatttctgtacaggaaagcgggcaatcattaaaataatatataagcagatcgtacgatataagagaaaaaggaagaggataatatgctgtttatctttttaacaattgctgcattgggtttgtcgttttgggcacaatttaaagtgaaaagcaattttcagaaatactcagacgtggaagcctccagtcagcggacgggggcggaaacggcaagacggattcttgatattaacggtttatatgatgtgccggtagaaccggtaagaggcactttaacagaccattacgacccgacggagcgggtggtgcgtttatctgagccggtatattacggccgctccatttccgccatttccgtcgcttcccatgaagtcggacatgctttgcagcatcaggaatcatacggcgcgcttgtgctgaggcacaaaatttttccggtcgtcaattttgcctccggggtcgcccctctgcttttcttgggcgggatgctcctgggcagcttgaacttaatcggactcggcattattttgttttcggccgctgtttttttccagcttgtcacactgcctgtcgagtttaatgccagcgcgagggcgaagcggattatcgtgtcggaaggattcattcgcaacagtgaagaacacggcgtgaataaagtgctgaacgccgccgcgctgacgtatgtggctgcggcgctcgtttcattattcgagctgcttcgttttgtgatgattttcttaaatggtcgtgatgagaattaacacgaaggaggtggccccttaccgtttgcggtaggggtttttttgcttatattaaaactgattctcattatgctgttaatcggattaacggccatctttgtcgctgcggaatttgcgattgtcaaaatccgcggttcaaaaatcgcggagctggttgaaaccggagacagccgggcgctcgcggcgcacagggtgatttcaaatctcgatgaatatttatcagcgtgccagctcggcattacgattacggcgctcggactcggctggctcggtgaaccgacgattcagcggcttcttcatcctgttttcagcctgatcggaatgccgtcatctattacgcacgtcgtcacgtttattgcggcgtttatcgccgtcacgtatctgcacgtcgtcatcggagagcttgcgccgaaaacgatatccattcaaaaagccgaagctgtcagtctgtggacggcgaaaccgctcattctgttttataaagtgatgtatccgtttattaagctgttaaacggctcagccggatttttggtcaagctgttcggttttcattcggtgaaagaacatgaggtcgtggtcagtgaagaagaattgcggctgattttgtccgaaagctataaaaaaggtcaaatcaatcaatctgaattccgttacgtcaataaaatatttgaattcgataaccgggtcgccagagaaatcatggtgccgcgcaccgaaatcgccgtcatctcgcttgaacagtcagttgatgaagccatacatttgatcatcaacgaacggtatacgcgatatccggttattaaggaagacaaagatcacattctcggcattattaacaataaggatttatttaaagcgtattttctcggccgctccattgaattaaaagaaatgatgcgtccggtcatcagagtcattgaaagcatccccgttcaggagcttttgatccgcatgcagaaggagcggattcatatggcgattctcgttgacgaatacggcggcacggcgggacttgtgaccgtcgaagacatattggaggaaatcgtcggggaaatccgtgatgaatatgaccaggatgaaatgccccacatcgtcaaaaaaggcgaacaccattatgtgatggacggcaaggcgctcatagaagaggtgaatgatctccttgatatcgccatcgaaaatgaagacattgacacgattgccggctggctcttaacacaaaaaatggagctgaaaaatggtgatgtgtttcatgccgaagggtgtgaatttaaggtgctggaagcggaagaccatcatatccgcttcgttgagattaaaaaaactgatttctgagcctcctgcttttgcaatgaggctttttttatggaaaaaatgcttcttcgtcccgctccttcatatgctgtaaagaaaggagtgtcggtatgaaaacggattggtggaaaacggcggccgtctatcaaatttatccccgaagctttatggattcgaacggggacggaatcggcgatattaacggcatcagagcaaagcttcattacataaaagagttgggggcggatgtgatctggctttgtcccgtttttgactcgccgggcgcggacaacggctacgatattcggaattataaacaaattgccggcgaattcgggacgatgaaggattttgaccggctccttgcggatgtccatgcgctcggcatgaagctgattatagacctcgtcattaaccatacaagcgatgagcacccttggtttatcgaatcacgctcagcgaaagattccgaaaaacgggactggtacatctggagagacggaaaaaacggcaaagagccgaataattgggaaagcattttcggcggatcggcgtgggaatatgatcaagagaccggccagtattacctgcacctgtttgacaaaaaacagcctgatttaaattgggaaaacgaagcgatgaggcagtccgtttatgagatggttcgctggtggcttgataaaggcatagacggcttccgggtggatgccatttctcacattaagaaaaaagaagggctccctgacatgccgaacccggacggtctcccgtacgtcccgtctttcccgtatcatatgaatggggaaggcataatggatctcttaaaagagctgaagcgggaaacattttcgcgctatccgatcatgacggtcggcgaggcgaacggagtggcggcttgggaggcggctgattgggccggtgaagaaaacggcgtctttcaaatgatttttcaatttgaacatctcggcctctgggatacggaagatgatcaaagcatctccattccggcgcttaagcgcgtcttgtccggctggcagtacagccttgaaggaaagggctggaatgcgttatttatggaaaatcacgaccagccccgttccgtttcggtatggggtgacgaacggtttttgacagaaagcgccaaggcactcgccgtgatgtatatgctgatgaaaggcacgccgtttatttaccagggacaggagctcggcatgaccaatgtttcgttcccatccattgaagattatgatgacgccgcaattaaatatctgtatgaaaaagagacgtcccgcggcgttccgcatgaacaagtgatgaagatcatctggaagaagggccgggataattcacggacaccgatgcaatggagcggtgaggcgaacggcgggttttctgatgcttctccgtggctcggagtgaatccgaaccacacatggctgaacgctgcatcacaattgcaggatgaaacatccgtataccatttctacaaacggctgctcgccctcagaaaaaaacacggcgtattgatcagcggcacatatgaattgctgcttccgaatgaccggcagatttatgcctatctaagaaaaaacggaacaaaaaccgccctgatcatcaccaatctgtcccgaacccccgctttatacaggcatcccggttatccgcttgactccgattctctcgtgcttgcaaacgtggaaacagaatcgcaccgccatgtgacatccttcctcttaaagccttatgaggcccgcgtatatatatggtgaaaaacttcagtcccgaggctgaagttttttgtgatctgtgtttatcatcgcgatccgacaggaaaagacaaatacagaaacgaatatgggaaaggaagagaaaaagaaaggaggcattcatatgctgaaaaaattgcagattcaaacaaacaaaagggatgaaatgatcgacatcacacatgaagccgaatcgtttctccgcgaaacaggcgtaagaaacggtttggcgctcatatactgtccccataccaccgccggcattaccatcaatgaaaatgccgacccggatgtgaagagggatatgctcagaaggtttgatgaaatgtatccgtgggagcacgaactggaccggcatatggagggaaatacggcggcacatatgaaagcgagtacaaccggcgcctctcagcatgtcatcatagaagacgggcgcctgatactcggaacatggcagggcgtttatttttgcgaatttgacggtccgcgaaacagaacatgttatatcaaaatactggctgaaacggaggaaaacaaatgagtgagtggatgagtccgttatcattaacaaagcccgtcattcaggccccgatggccggcggactggtcacgccgcgtctggcttcggcggtatcaaatgaaggggcgctcggaagcctcgcttcaggatacgtcagcccgcaagcgcttgaaaaacagcttatcgagatgaaagagctgacggaccgctcctttcaagtaaatcttttcgtcccggaagaaagacagatgcctgaggcggaacttgttgaaaaatggaaagcccgcattccgagggcaaaagacgccaagccgttctctgatctgaaagaagaatggaatgatttcgcggaaaaagcggagcttctgatccgttacggagtcaaagcgtgttcattcaccttcggcctgccgccggaaaaaacggcggaaaagctgaagaaaagcggttgtttccttttcggcacggcgacaacgccggaggaagcgaaggcttttgaagaacggggaatggacgccgttatccttcagggaatagaagccggcgggcatcgcgggtcgtttctgccggttaaaggagaaccggctctcggccttatggcgctgattccgcaggctaaagacacgctgaatatcccggtgattgcggcaggcggcatttttgaccgccgcggggtgcaggcggcccgatgtttgggtgcggacggcgttcaagtaggaacaccgtttctcctttgtgaagaaagcagcgcctcaccggcatatcaaaaagccattgccgaatcaaaaggagccgatacgcggctgaccaccctgttttcaggaaaacaggcgcggggaatcgtgaatcagttcatgaaaacatatgaagctgacgagggaaaaacgctgccttatccgctgcataatacgctgacaaagccgatgcgcgggcacgcggctcaatcaggagacgcggagcatatgtctttatgggccggccagtccgccgcgaaacttgaggggccgacagacgtgaaaaccgttttggacagattgtgcgaatcataatccagaaatcgtgaggtgatggatgatgaagattcttcaaatgtcctataaaaaaagagggactattgagtttgtctttgaagattttccgcattccaaagtcaccatggcgccgattaaagggtattactttgtccgcgccattaaatggagcagacgggacagagccgtcacccgccatgatttagagaagtttgaatgggctgcaaaccaagcgctcggcacgacggctttttaccggaaaagaaaagcatttcacatcccatcgtcacaatgacagacgatgggattgttttaatgcatgatctgataaagcgcgggtgcatcaagccttgttgcctggttaagcagataagccggctgcacggcatttttttttcttaaagaattcaatctctggatgatttgttcagcggtcagaatcccgagaccgtgggcgaaatattgatcattccccatcacaatgacattttctccccgccactgagcctttgcagggttaaaatcaggatttttaaaatataaacagtctccccgtaaaaagtggctgccggtttccgtgtagatcggcagatgctcatagtgccagtcatacaaagtgatatcccggaaacgccggttaaaccgttcttcaccgattgtctttaagacggccagataataaatcacaacaatggcggtagcgcattcaaatgcgtaaaacgccccgttttcaataatatcccgaatcgcttttgaagcgggaatcctgtacttcagctccagggctccttccggcgtcagtctccaataagccgtatttccgtatgttttggcgaaagttgcaaatttcacacctgatccgtgcagttctcttgcggcttccacaatatggcggcgcagccgcacctcgaacatcagttcagcaatcgacccgtaatcgaattgtacgggagaattgagcagttcatttatatacggaacaaggctttcttccgtctgccagttcgcgatgtcctgaggccgaagcacttggccggatatgataatcatctgcgcgccccctatctttttttataagatatgcaggaagcttgggcaatgaaaatcaagtgataaaaaaggaggaaatgttaacaaaatgtgaagactgagccgatatataaggtatcacacttgagggagcagcttaatatgaaaaaattcattaattggtgcacaaaggcatcgatttcacggaaattaatcatttcatttatcgtgatcttaatcataccgattctcgtgttagaattcagttcataccatacggcgagcaattcgctggatgatcagatttcaggcaacgcgaaaaataacatcgaatcttttaacacaacgattacaaatgatatcggcgcaaaagcaaaggcgattgaatttttcagtgaaacgttaaaaggatcatccttctcaaagaaaaacatgtctgctcttgaagaaaagttcgggcaatacacgtctattcataaggacgtagcccgcatttacggaggaacggaagacggcagctacgcacaggcgccgaaggaaaatactccggccgattacgatccgagaacacgcacttggtataaagacgctgtgaaggccggcggcacgctcgttgtcaccgacccttacaccgcggcaagcgacggcagcatggtcattaccgtggcaaagcagatgcaggacggaacaggcgtagtggccatggatattacgattgaccagctgctgaagcagatgcagggaatcaaaatcgggcaaaaaggattcgtgtttatcacgtccaaaaataaaacctatgtcgcgcataaagaccacaaaccgggcgataaagtttcaacgccgtggctgaatgaggtatacagcaaagacagcggcattatttcatacaagctcgatgatcaaaataaaaaaatggcgtttacgacaaataaactgaccgggtggaaaatagaggggagcatggagctcaacgaaattaaagatgcctcacaaccggtgctgacgatggggatgattgtccttgcagcatctattatcatcgggggaattttaattctgttgattgtcagatccattacgtcaccgctgaaacggcttgtccgctcttctaaacaaatcagcggcggagacttgactgaaaccattgacatccgctcgaaagatgaattgggcgaactcggcgcgagctttaatgaaatgggagaatctttgcgcggactgatcagcgcgatccaaaactctgtcgataacgtggccgcgtcatcggaagagctgaccgcttcagcttctcagacaagcaaagcgacggaacatattacaatggcgattgagcagttttcaaacgggaacgaagagcaaagcgaaaaagtcgattcaagctcagccaagctgaatcatataaatgacggactcgccgccgtttcccgcacatcatcatccattacggaggcatctaaacaatcgaaggaagctgccggcaccggggaagaatatgtgcagcaaaccgtcgggcagatgaatctcatcaatcaatcggtccagcaggcggaagcggttgtaaaaggccttgaggccaaatcaaaagacattactcatattttaagagtcatcaacggtattgccgatcagacaaacctgcttgcattaaatgcagccattgaagcggcaagagccggtgaatacgggcggggcttctcagtagtagccgaagaagtgagaaagcttgccgtccaatccgccggttctgccaaagagattgaaaaactcattcaggaaatcacggctgaaattaatacttcgcttcacatgtttacatccgttaatgaagaagtgcaatcaggacttgccgtaacggatcgcacgaaagaaagcttccagaatatcttcggcatgacgaacgacatcgccgaaaaactgcaatcaatgaacggcacggttgaacagctgtcagacagctctcagcacgtttcagccgcagtgaccgatattgcggacgtatcacgggaaagcgcagcaagcattcaggatattgccgcatccgcagaagaacagcttgcatcaatggaagaaatcagcacatccgccgatactttggcgcaaatggccgaagaactgcgggaattaacgaaacaatttaaaatcaactagtaaaaaaggacgctttccaggtggaaggcgtccttttttatagtgacagccggataattaaataaaaagtcttgcatacaaagggagtacatagaactatttttcatttatgacttaattttcaatgtaataaaaagggagtcggccgatataaacagtaaatgattgaaagaggtttacaaaattgaaaaaaacagcaaaaaaaatcgccagaaaatcaatagccaaaaaacttatcatttcatttttactgatcttaattattccggtagcagtattggccgccggcgcctaccgttcggcggcttcatccgttgaaaagcaaatgatggaaagcgccgaaggaaatgtgcaaatcttaaacaatatgattgatgaccggatcggaatgtttacaaaaagctctgcatatttcagcgaatgggcgacaagcgctaaatttaaagaaaaaaaccaaacggaaatgcaagaaaggtttaaacagtttattgaaagcaatgataaagcgtccgccatattttcaagcagcaaggaaggaacgtttacccgttatccgcatgccgatatgccggccgatttcaatccgcttgaaagaagctggtatcaggaagccatggagaataaaggccaaaccatcatcacggacccttatgagtccatctcaaacaaaaagatggtcgtcaccatggcccgcgcggcgcaagacggatcaggcgtcgtcgccattgatataaaaatcgacgatctcatcacgatgacaaaagaagtgaacatcggaaaagaaggatacgcctttatcctcagcaaaaataaaaaagccgttgcctacagtgatgaaaaagccggcgcggcggtatcgggaaaatgggttgatacattatacagcgggcaaaaaggcgactatgaatatacgctgaacgggaaagcgaaaaaaatggcgtacgtgaccaatgaagcgacgggctggaagatcagcggaaccatgtccgtggatgaaatcaaggatgcggcaagaccggttctgactctggccgttatcatattggcgatagccgttgccgcagggatgattttcatttattttgtcatccgctcaattaccaaaccgttaaaacgtctcgtagcttcagcggaaaaaatcagcagcggagatctgactgaaaccattgatgtcagctctcaagatgagctcggcgtgctcggtaaaagttttaatcatatgacagattcactccgttcgcttattcagggaattcaggactctgttgaacatgtcgcttcttcctcagaggagctgacggcttcggctgagcagacgagcaaagcaacggaacatatcacccttgcgattgaacagttttctaatggaacggaagaccaaagtgagagtattgataaagcgacagcacaagtgaatgagatgaaagacgggctcagcgatctggcggaagcggcagccgttgtgacggaaacttcaattgaatcggcggagatatccggcgccggtgagcggcttgtcaagaaaacagccggccagatgggcgccattgaccaatccgtaagtaaagcggagcaagtcgtacaagggcttgaactcaaatcgcaggacatcaccagcattttgcgcgtcattaacggcattgccgatcaaacgaatctccttgctttaaatgcagccattgaagcggcaagagcgggagaatacggacgcggtttttcagttgttgccgaagaagtgagaaagcttgccgtccaatccgccgattcagcgaaagaaatcgaatccttaattcatgaaatcgtcaaagaaattcatacttcgctcggaatgctggaatccgtcaatcacgaggtgaaaagcggacttcagttaacggacgaaacggaaaaaagcttccgggacatttccgctaaaacaagtcagattgccggtgaactgcaaaatatgaatgcaaccgtggaacagctttctgccggatctcaggaagtatcaaacgcttcagaggatatcgcggcagtctccagacaaagcgcggccggcattcaggacatcgcggcttcagctgaagagcagcttgcgtccatggaggagatcagttcctcagccgtcacgctggaaaaaatggcggaagaattacgcgaactgacaaagcgttttaagataaactcttaattaagtctaaaagactaattttgcaataggtaaaaagtatgtttcgttatatttcttctttttggatgtgtatatttacccataattgccgatatgaagggtaaacacgcaagaggagatatagcagatgaaaaaaattgtgcaaatcatcaagcagagatcgcttacaagaaaactgctcatttcttttttggccattctcattcttcctatttcaacgctggcttttatcgcctatcaatcggcggtaagtacgcttgacaggcagatgatgggaagcgcattagataatgtgcagcagattaacgatatgatcaacacaagcatcagccaaaaggaagacggaacggcatatttcagcgactggctcacaaaggatcggtacaagccgaaaaaccaatcgcaaattaccgataaattcacagagtacatgaagattaataaagacgtggaatccatctatacgagtgacacggaaggacatttcacacggtatccggatctgcagatgcctaaaggatataatccgcttgaaagagactggtataaaaaggccgtggaaaataaggggaaagttgttgtaacagatccttaccgcacggcttccaccaatacgatggtcgtgacggtcgttcagcagacgaaagacggctcaggggtcgtcgccatcaatatgaaaatcgatgagcttctgaaaacgacaaagaaagtgaacatcggaaaatcaggctacgcttttatcctgacgaaagacaaaaaagtggtcgcccacccgaaccgtgcgtcaggcacagtattaaacggggagtgggctgaacagttgttcaccagcaaaaaaggtgattttcaatacaaatacgacggccaggaaaagaaaatggcttatgatacgaacgggctgacaggctggaagattaccggaacgatgtatctggacgaaattcatgaagcggccctgccgatccttcatctgtccctgctcgttctcgtattagcgattgtcatcggaaccatcgtcatggtgctgattatccgttcaatcacaaaaccgctcaagcagcttgtgacatcatcgaaacagatcagtgaaggcgacttaacagaaacgatcgaaattcagtcaaaagatgaattaggcgagctgggcaaaagctttaacaatatggccgcttcactcaggtctctcatccatgccattcaggattccgtgaataacgtcgcatcttcctcagaagagctgacggcttcagcggagcagacaagcaaggcaacggaacatatcacactggcgatcgaacaattttctaacggaaatgaaagccaaagtgaaaatatcgaaagcgcggcggaacatatttatcaaatgaacagcgggcttaaagatatggcgaaagcatctgccgtcattaccgaatcctccgccacatcagcggaagtcgccaattcaggcggaaagctcgtccaccagacggtcggccaaatgaacgtcattgaccggtcagtgaaagaagctgaacaagtggtgcgcggacttgaaacaaaatcaaaagacattacaaacattctcggtgtcattaacggaatcgctgatcagacaaaccttcttgcgctgaacgcggcaattgaagccgcgcgtgcgggtgaatacggccggggcttctcagtcgtcgccgaagaggtcagaaaacttgcggtccagtctgccgattcagcgaaagaaatcgaaagcttaattatagaaatcgtcaacgaaatcaatacatctctcggcatgttccaatccgtcaacaaagaggtggagagcggactggatattacgaatcagaccgaaacgagcttcaaacggatttctgaaatgacgaaccagatcgccggagaaattcaaaatatgaatgcgacggtagaacagctgacagcaggatcacagcagatttcaggagcttctgagcaaatcgcgtccatcgcaaaagaaagctccgccagcattcaggatatcgcggcctctgccgaagaacagctggcttcaatggaagaaatcagttcgtcttcggaaacgttatcccaaatggcggaagaattacgtgatatgacgaaacgatttaaaatagattaatagatcatagaacacccaaatgtgctgtttgggtgttttttttagtttttttaataaatcttttgtcctatctgacgatattagatttagcttttcaaagaaggagactgaaaaaatgaaacaactgatacattggatcaaacagccatccatcagcaagccgctgatcgcggcatttttagccgtattggtgcttccggtcggcatactcgcctacttcagctaccaaacggcggggagtacattagaaagcgaactgacccacagcgcccagggaaatgtcagtgaactgaacagcgtgctggaaaacatgcttgagggtaagctgaaagcgattgactactacagcgaatcaatcacaaaggaaaaactgaacacgaaaaataaatcggtactgctcgacaatatgaagcagtatgtcaccgtaaatggcgatgtcgcgtcaatttacgccgcgtctcgcgacaaagcgtttgtgaaatatccgtccgctgacatgccgtccgattataatccgctcacgcgcgagtggtatacaaaggcggttgaaaaaagcggacagccggtgtttaccgagccttataaagacgctgcaaccggacagacggtcgttacgattgcccagcagacaaaagacggatcaggcgttgtggcgcttgatattaatctgggcgacctgctgaacgcttccgaacgcgtccagatcggtcataaaggatttgccttcattacaacgggggataaaaaatacatcgcccatccgactataaaagcgggaacggaaggctccggagagtggacgaaagaagtattttccaaatcaagcggatcgtttgaatacatgtttgaaggacagcagaagaaaatggctttcacgacaaacaaactgacgggctggaaaatcgccggcacattttttgtcagtgagatccatgacgcagcctcgcctgtcatgaaaatggcgctgatcatcctggcggtttctcttatcgtcggcggtattttaatcttctttatcattcgctcgattgcaaaaccgctcaaaaaacttgtctcgacatcagataaaatcagtgacggcgatttaacggaagtcattgacatcaagtcaaaaaatgaattcgggcagctcagccaaagcttcaatgagatgtcggcatcactccggtctgtcatcggcgtcatccaatcatccgtcgaacatgtcgcttcttcatccgaagagctgacggcatccgccggacagacaagcaaggcgacagagcatattactctggcgattgaacaattctcaaacggaaacgaatcacaaagcgagaaattggaagaaagtgctgatcacctttcccaaatgaatgcgggcattgccgagacggcgaatgtatcggcggaaatcactgaatccgccatccaaacctctgaaacggccggaagcggagaagaattagtggcgaaaacggtcggccagatgaaaacaattgatcgttccgtacagcaggcggaagccgtcgtaaaagggctggaaacgaagtcgcacgacattaagagcattctgaacgttattaacggcattgccgatcaaacaaatctgcttgccttaaacgcggccattgaagcggcaagagcaggcgaatacgggcggggcttctccgtcgttgcggaagaagtgaggaagcttgccgtacaatcagccggctccgcaaaggaaatcgaaacgctgattcaggaaatcgtcaaagaaatcgccacatcgctttccgtattccaagcggtgaatcaagatgtgaaggaaggcctcgatattacggatcaaacggccgaaagcttcaaaaaaatctcagagatgacgactcagatttcaggcgccttgcagcatatgaacggaacgcttgagcagcttgcagccgggtcgcaaaatgtgacaaacgcggtggaggacattacctcagtcgccaaagaagggtccgccggcattcaagacatcgccgcctcagctgaagagcagctggcctccatggaagaaatcagttcatccgccgaaacgcttgcgcatatggctgaagaactgcaacaggtcacacggaaatttacgattcagtctgaagacgaagaacagctgtaacgagctgtttcttttcctcatctgaaaaaagcgatacactaatataaaagaagggagtggcagtgatgagattagaaggcaaaaaagttatagcgcttgtcagtgacgattttgaagacttagagctttggtatcccgtctatcggctgagagaggaaggcgcgatcgttcatttaataggagaagaagcgggccgttcatacaaaggaaaatacggcgtgcccgcgacggcggattacgattttaagagcctgattattcaggagtatgatgccgtgctcgtgcctggcggctgggctcctgacaaactgcgaagatatcccgaagttttggacatcatccgtacgatgaacgagcagaaaaagccgatcggccagatctgccatgcgggctgggtgcttatatctgccggaattctcgcaggaaaaaaagtaacgagcacgcccggcatcaaagacgacatgacaaatgcaggggcaaagtggctggatgaagctgtcgtaactgacggccacattgtatcaagccgccgcccgcccgaccttccgcagtatgcaaaagcgtttgctgacctgttagcgtccaaataaaaaacatccgcccgaatccgggcggatgtttttagttttgatcggcgggaaagacgattccgatttgttttctcgcttcttccataatgtttgccgtaatgaaagaacgttcaaatgtattttcggaagactcccgctgtccgtttcgaagaagattgatgaattcagccgtttcgtagtacatcgaaggtttcagatcagggactgaaatgtcttccgtccggccgtcacgatagcggatttccgcccgttccggtccgtgaatgctgtccagaacgatcgtgccttcttcaccctgaatttccgccggggcaaacgaatttgagattttcgaatgcatcagcaccgcttcaaatccgtcgtatgacagaatgaccgtgccttcgccgtcaacgccggatgctagtttatgaccggtcgcaatgacgtttttcggtttgccgaacaggacgacggccggataaatgcagtacacgccgatgtccattaacgaaccgttcgataattcaggcttaaacgcgttaagcaccgtaccgtttttatatgcatcatatcgtgatgaatattggcagtagcttgccgtgaatctcctgacgggtccgattttatgtaagtggttttgaagcatgctgaagttcggcaggaacgtcgttttcatggcttccatcaagagaacgccgttcgttttggctgcgtgaatcatttcatccgtttcccttgcgttagacgcaaacggtttttcgcatagtacatgcttgccgtgttccataaaaaggaccgcctgctctttgtgaaatgcattcgggctggcgagatacaccgcgtcataggctttgctttccgccatttctttcaggctggtgaaataatgagcagcgccgtgtttgccggcgaattccgccgcacgttcctcagttctggaataaaccgccgttaattgaaaatcatcaatagcagaagccgcctccagaaatcgttctgtaatccaattcgttccgactgttgcaaatcgaatcattgctatcgctccttctatgtattggcttacattatagctttttttcaaagaaacataaatggaaaaaaggctgccagctaaacggataggaaaaattcccatagagaccggttattatttttcattacaggaacgatagtgtacaatttaagtaaaatacatatgatggaggaacaatagtggaaacattgcaaacatggggcggcagatttaaacagtttttcttagacaataaatttgtcttgtttttgcttgtattgctgctcatcggtctcaatatccttgtctttatgaagacatcatttattttcacacccattatcgtcctgctcaaaacgattgcgctccccgtcattttgacaggaattgtttattatctgcttaatccgatcgtagatatattggaaaaaataagagtgaaaagagtctattccatcctgctcctttacctcattattatagggctgatttcgattacggtcgtttcaattattccgtttttaaaggaacagatcatgagcctgatcgacaacctgccgaaatatgtggacatcgttgaagatcagacgaaaagcctgatcggaagcgattttgtaaatcaggcgcaaaagacgatgaatatcaacatttcggatcttgccaataaagtatcggcgcaggcggcgacaattgcaaacagcacatttaccggagtcgggaattttatcggcgcgctgactgaagtgattatttcaattgtgaccgtgccgtttattctgttctatttgctgaaagacggcaaaaaactgccgatctatatcttaaagtttgtgcccacccgtctgaaagaacaaacgtatacgatgctgagtgaaatgaaccacagattaagctcctatatcagaggacaggtcatcgtcagcttctgcatcgggtttttattatttatcggctatctgattatcggacttgattatgcgtcactgcttgcggtcattgccgcttgtacgagcgttgttccgtatttagggccgaccattgctatcacgccggcgattattatcgcgttggtcacttcgccctttatgctgctgaagcttgcgattgtctggaccgttgtccagctcgtggaagggaaattaatttcgccgcagatcatggggaaaaatcttcacattcacccgattaccatcatctttgttcttttaaccgccggaaagctgttcggggttgtcggcattattttagccatcccggggtatgcggtcatcaaagtggtcacgacccatctgtttgattggttcaaaatgcgttcgcatttatatgaagaagaaaaaaatgatgctgtatcgaagtcataaaatcggaacggacatgatatttattataagacaggctttccttcaaaggagagcttctcttttgtaaatgatgaatgaagggaagaatgggatgacactatgggagatgttcacagcagccgttttgggaatcgtggaagggctgacggagtacgcgccggtttcttccacgggacatatgatcatagcggatgacatctggctgaaatccggaagcctgatgaatccggaagccgccaattccttcaaagtggtgattcagctcggttcgattctggcggtggccattgtgtttaaggatcggatattacatttactcggcctcaaaaaaaacgtcacgcgcgatcagcagaagggatacaggctgaccatcgcgcaaatcgccgtcggtcttgttccagcggcggtgctcggctttttatttgaggatttcattgaccgctatttattctccgtcagaacggtcgcttacggattaattgccggagccgtgcttatgcttatagcggactggatcaataaaaggaaagaaacgatcgatacggtggacagaatcacctacaaacaggctttctgtgtcggattattccagtgtctcgccttatggcccggattttcccgatcaggctcaacgattgccggaggtgttattgtgggcttgaatcaccgggcagccgcagacttcacatttattatggcgattccgattatggcgggcgcaagccttctgaagctggtgaaatactggagcagtctttcttatgacatgattccgttttttcttgtcggctttatctgcgcctttgtcgtcgccctcttagtcgtcaagttttttcttcggctcattaaccggattaagcttgtcccgttcgccatttaccgtgtcatcctcggcatcattttaatcatgctcgtgcgataaacgaagaggccccccggagggtcttctttttatgttcgaaaaacgtctcaggaaaatatgagcaaactgaattttctgcttgaaattcatagaagagtcgtctataataaaacatgacgttacagcacggggccatagctcagctgggagagcgctacgctggcagcgtagaggtcaggggttcgagcccccttggctccatacctttaaacccttattctataaataagggtttttttgttttttcatcctctgcagcagcctctgtgttccgcttcatttctaacaactcaaaataaaggaaagagagaaaatgaaaaagaaaatctatcttatattatctctgtcagctgcactggcacttcttttaacggcgctcccggctctttctcctgtcatcttcacgtctgcttcagaaaaaggagccatcaggcatgacatttataaaaaaggatatccgtatcaaagctactttgcgattcttcaaaaagaagaaggaggcggagaggacgggaacctttattatgtaaattggttcaattggaaagatgaaaccggacagacgccgcacgtatgttattcaaaaaaatcgtccgaaggcgagtacaaagtaagctgcggaaccggatcgtaatgatcaagagcccctctgcaatgaggggctctttctgtcgatgtggatccgcttaataccccctatagaacggctgaacataatgccgatacggatcattcggataatgcgtatttggctgataaggcttattcatatcatgaatacccgtgttttcagactgtccgcagtatttatcgggacctatcacagttgattgccggatcggtgaaacggctttttcccactcgtgctcattcagacagtacgtatgcgccatgatctcaggcggcgtcagacggagaatatccgagccatatatcacttcaggcgaaggggcgtcaaatatggccaaaaggtgggttttgtctgaagtggcgacttcataatgccaccacccctgcggaacattcgccacttgtcctggagagatcggataattccgtattttctgggtgaacggattcagcatcgacaccaccgcggaacccgaaatacagtacaccaattcagcggcgttttgatgggtatgcggttcaatcacatttgttttactcagaaagatatctaataatgaaatattttcaagcgtgtttaactgtttaatccccaatacattgataaagttccgagcatctttcgtaaaaaaacggctctcatttacatcataagtgaactgtgtattcggagacgtgtaatcgatatcggaaaccatgcaatcccccgctttcatctttaaacgtatattcccaaatatatgtgtccctgtttcaccgggtgataaaaaaggaggtaaaatccataaattccaaattcaacacaatattgtgacgacttttttaaagattcattttagatatatcttttattcgaaatatctcttactataaagatatattaaaaatacatctttagaagggttgaggatgaacatgctggatgagagaacagtagacatcatcaaaagcacagtacccgtattaaaaacacatggagaaaacatcaccggacgcttttataacctgatgtttcaagatcatcccgaactgttaaatatgtttaaccaaacgaaccaaaagaaacagactcagcgcgcagcattggcaaatgcagttattgcggctgcggcgaatattgatcaattagaacaaatcattccggcggtcagacagatcggccataaacacacaagtatcggtgtaaaaccggaacattatccgattgtcggaaagtatctgcttctggcgattaaggatgtgctgcaggatgccgcaactcctgaaattatgcaggcatgggaaaaagcttacggtgttattgcggaggcttttatcggcattgaaaaagacatgtacagtgaagccggatggcaggggtataaagaatttacggttatacagaaaacaaaagaaagcaaagatatcacatcattttatatcaaaccgagtgacggctcttcgcttcctggatttgaagcgggacaatatatcagcattaaagtgaggattgcggattctccttatacgcacattcgccagtacagcctgtctgatgcttctcgaaaaggcgcatatcggatatctgtgaaaaaggacggagcggtttcttctcatctccacaatgaagttcaagagggagataaacttgaagtcagtgcacccgccggggatttcaagctgtcttcttccgaaaaaccggttgttcttatcagtgccggttccggaatcacgccgatgatgagcatgctgaaaacagccgccgaaaaacagcccgagcgttccgttacttttattcatgccgcgaaaaacggagagtacgccgcgttccgcaaagaggctgaacaagctgcggagaatcatccgaatattaacgtcatttatgtatacagtgaaccggcagaacaagaccgctcaggagacaagcctttttacagcggccggattgatcaaaccttcttggagcagcttcatctgaatcaagatgctgaatgttacttgtgcggatcagcacagtttatgacgcaaatgaaagatatgattcttgcactcgggtttgactctgattccgttcaatttgaattgttcggccctcagctgagcatggcataacaaaaaaagactcctcattgaggagtcttttttatttgcacgatgtgttctttctccgtctttttccctattttattgaaattttcatcaatgaccagtaaaattataaatctagtgattccggaattaaaggaaggttgatatgaaaaagaaagcaaagaccaaaagggtgcttgggtgcctttttgctgtatctcttatattcggattatttctggtatcaatggtattttcgaaattcatagtgacggaagaaaaaccgcctgaagaggtggacgagcagcaggtctttattgacagcctttccgggcatgctcaaattttatatgagaaatatcatgtccttccgagcatcaccctcgcacaggccattctcgaatcggactgggggaacagtgagcttgcggggaaagcgcgcaacctgttcggtgtaaaaggtgattataaaggaaaacacgtcacgatgaaaacggatgaatttgaaaaaggaaaacgaaaaacgattcgggcaaaattccgtaaatacagcacgttttttgaatcaatggatgaccatgccaaattatttgtcaacggaacgtcttggaataaaaagaagtacaagcccgtcattgaagcggacaattataaaacagcggcggctgcccttcaaaaatccggctacgccacagaccccggctatgctgaaaaaattaaagatgtcatagaaacctataacctgaatgaatatgacaaaatcaatgcctctcttaaagcagttgataagaaaggcgccatcaaagaccacgccattgaagacgtgtggtccaagccgtcgaaagagcggcattctattaaactggcatcggcgcaaaagtttaccggccagcatattaaagtcgtatctgaaaaacaaaacggagaatccgtctggtaccaaattcaagtgaaagataagctggtcggctgggttgaccaaaccgccgtccagttaagtgaagaaacataagcatcaaaaaaagccggcagcttgccggctttttttacattccttcagtttcaaaccttttaatatcacgtttatgccccatcagcacaaggcagtcacattcatgaatgacagtctccggagaaggggacagctgaatgtctccattatgtttcacggcgagaatggtgcagccgaatctggcgcgtgcgccgagatcaagaagggattttaaatgcagctttttagtggctgaaagctccacaatgctgtattcatctgacaaatcgatgtaatttaagacgttttcatctgaaaggctttgcgcaatccgcacgcccatatccttttcaggatggataatacgatcagcaccgatcttttcaagcactttgtgatgataatagttttgcgctttcacccaaatattagggatgttcagctccttcaataacagcgtcgtcagcgtgcttgcctgtatattggctccgattgctacgatgacatattcaaaatttctgatgccgagcgactgaagctcgctttcttccgttgaatttgcccgcacggcatgcgtggcataagaggagtatgcgttgacccgctcttcgctgatatcgatcgcaagcacctcatgccccattttaaaaagctctttacagatgcttccgccgaaacggccgagtccgatgacggcaaattgtttatttttgatttttcccaatcctcataactccttaagaaactgttttcgtcactccaaatacaacaaacaagaatgtactcctgtttcaggggtttgtcaatgcgagggccggaagaaagaaaacagcacaaaaaaagaccggctgacaagcgatgagcttgtgccggtccgtttttcgcaattatttgcagttgcatggctgtgtcggcggtgtgctgcgtttttgaacaacaattgtgtcctcagcatagaatttagagccgatgcttaatgatttattttctgcacggaacttatatgtacctgcagcaggcaatgttttattattaagagaaagcttaaattccgctgcgccgagcaaatcaatgtttaacggaagtctgactgttttgccgttattcagaatctgtctttcgcgcaaagcgtgtccgttgactgtatcttttgttgtagccgcaaatccgctaggaagggtaaattccataacgcctaagctcaggatcgtgttcggacggtacgtcaattcgatatcagaaaatgaccattcctgctggctggcacctgtatattttgcaaataaggtagcagtcgctttcgtggacatttccggctcgtgaacggttgagcctgactcagcggcgaatgacgctgtcggcagagaaagaagcaaaaccaggccgaataaacttgccatgacagttgagaaaaacttgtgtttcatttttataaatccccctaaaaaaaatttgctgattgttcttaaaaaagaacgaccatacctataaaaatttaccatcaattttaatggaagtaaatggggttatgttcctatattttctcaaaaataatcaaatcacgacaaaaaacgcctgaatcaaaatcaggcgtttttttcgtccgtttctatcggaataaatttaaaaatctccccgctctgaaccgagtcggcgagccgcttcagccaatgataataagctttcgagctttcaagctgatcatataactgccgcgcttcttcctgtaattccgcgctgccttcctcggccagcaaaacggactgcaaatccgcctgagcctgtacgatggcggacaaattcacctgaacttcacggtcccatttcggcggaaagaaattcgtgaaaaacgtaaagaaatccttttccgctacaaacgtatgcttccgtgtgccgcggtgaaaggtttttttgaccacatttaaatcctgcagctttttaacgcccgtgctcatactcggtttgctcatctgcagttcctcacgcatttcgtcaagcgtcatttcatccctcatatacattgttccgtataaaatcccgacactccgggtgattccgtaaagatccatcgtctctgcaatggaatcaatgacaagatccctggcttgttctatagctgcgaattctggattctcatccatactgtccctcttttcctcttgaagtttaaatttgttaagtcatttctttatgttcttaatcttaacgaatcatgacaaaatgtcaaaatctaaacggactgaccgggttttgacaggcaaaaaaacatgtgttaaattaacattgttaaaaacattaaatttttatttaacaaacttacttctcggtaaggaggactcttatgagcaaaacgctttatatcggcggcgaatggatcagtgcagaaaaaaaacagacccgccgtatcattaatccatttaatcaagaagaaattgcaacggtatgcgaaggagaccgggatgatgcggtgaaagccatcgccgcagccagaaaagcatttgatgaaggggaatggccggtgctttccgggctcgagcgcggacaatttgttctgaaaattgcggaattaatcagacgcgatctgaacgaattagctgagctggaatcgcttgatacaggaaaaacgattgaagaaagtaaagccgatatggatgatatcgcaaatgtatttcaatattatgccggtttggcggataaagacggaggcgaagtcatttcatctccgattcccgattcagtaagtaaaatcgtcagagagccaattggcgtatgcggacaaattacgccgtggaactatccgctccttcaggcgagctggaaaatcgctcccgctcttgcggctggaaacacgatcgttttaaagccgagcgagattactccgcttacaaccattaaagtctttcaattaatagaagaagccggtattccgaaaggggccgccaatctcgtgctggggccgggcgcctctgtcggcgatgagctggcgagaaacctcgacgtcgatttggtctcttttacgggcggaattgaaacaggcaaaaaaatcatgcaggcggcaagcggcaacgtgaaaaagattgccctggagcttggcggcaaaaatccgaatatcgtatttcaagatgcagatctcgaaacagctgcagatcaagcgctgaacgccgtgtttttccatgccggtcaagtttgttcggccgggtcacgtcttttggtggacgaagccattcatgatgaatttttagccgagctgatcaagcgcacgaaacgcatcaaattaggaaacggttttcatgaagatacggaaagcggtccgctgatttccgccgagcatcgggccaaagtcgaaaaatacgtagaaatcggtatcgaagaaggggcaaaactggaaacaggcggcaaacgtcctgatgatcccgcccttcaaaacggtttcttctatgaacctactattttctcaaactgcaagtctgatatgcgaatagtccaagaggaaatcttcggccccgttttaacagtcgagtcattctcttcagaagaagaagtgatcagacttgccaacgataccatttacgggctggccggagcggtatggtcaaaggatattgaaaaatgcgaacgcgtagccgccaaactgcggatgggaacggtatggatcaatgatttccacccgtatttcgcgcaagcgccatggggcgggtacaaacaatcgggcttcggccgtgaactcggcaaaatcggcctggaagaatacacggaaatcaaacatatttaccgcaatacgaaacctgcggctgtgaactggtttcaagcataattaggaggagatacaatatgacattaaatatgaaagtagaaagcatgcataaattccatacattcgaaatcccgacagtcattaaacacggaatcggcgcgattcagcacgcgggaagtgaagtcagagcgcttggcgtcacaaaagcgctgctcgtaacagacccgggaatttataacgcgggagtggcaaacccggtcattgaatctttgcaggaagcgggcatcgaagtcgtcctgtttaacaaagtggagccgaacccgcctgtacgtcttgtaaacgaaggatcagaactgtataaaaaagaaaactgcaacggtcttgtggctgtcggcggcggaagctccatggatacggcgaaagcgatcggggtagaagcgacacacgaaggaagcgtgcttgattatgaagccgcggaaggcaaaaagccgctggaaaaccgcattcctccgctgacaacgatcccgacgactgcgggaacaggttcagaggtcacacaatgggcggtcattacagatgaggaaagagaatttaaattcaatacgggcggaccgcttatcgctgcgcatttaacggtcattgaccctgagctgcacacgtccatgcctccgcatgtgacggccatgacaggtattgacgcacttgcgcacgccatcgagtgctatacgatgaaattcgcgcagccgatcactgatgccgtcgctttaatggccattgaatatgcggcgcattatattaagcgcgcgtttgcggacggagaggatttggaagcaagatacggcatggcgcaggcggcgatgcttgccggcctttcatacggcagtgaatcagcaggcgcggcgcatgcgatgagccagacgctcggcggcatcatccctgtcgctcacggacaatgcgtcgcagctatgatgggaccggtaatggaatacaactggaaaggctatccggaaaaattcgcccgcatcgccaaagcattcggaatcgatacaagcaacatgacaaccgaagaagcggccaaagcgtccgtcaactggatgtatgatcttgtaaaagatttagaagtgccgagtttagaagaacaaggtgtgtctccggacatgattgaacgtttatcaaaagaagccatgaaagatccgcagactttcggaaatccaagagatttgaatgagaaagcatacaactggatttacaaacgctgctttgacttaacgccgaaaacggtataataaatgaaccccgctcctttacagagcggggttttttaaggataatgtcaagaaaaaggcggtggtggctgatgtggaaacgcataacagcaaagacggaaggcgtatatatagcggataccgaacaatttgttaccaaaaagatggacaagcttcgcgcggaatacggcgggtttcccggtgacctgcatttcggactgacaaaaaaggccggcgcgcgtgagccgatgtatgaaagaggaacagaaatttttaaccggagacaaatttcaatcgtgtccatggaggaatgtgatgacattgcggagaagatggggatttctcatatctttcccgaatggctcggcgctaacatcgcaatcagcggtttttctgcgctgacgccgcttaaagaaggaagcagaatgatttttccaagcggtgcgtctctgttgtgcgagggagaaaatgatccgtgcattcagccgggagaagtcattcaatccttttatccggctcagccaaaactcgccgcggcgtttgtgaggcacgcgatgggcagaagaggaattgtctgtattgttgaacgcccgggtgatatatgcacgggcgatgcggtcaccatccattcctatgaaccgaaacgcgccaagaaaaaaatcgagaaggtctgactcagaccttctcgattttttgtttgatttcttctatttgatcgatgtgacgcttttcatgatggccgataaaatcaatccactgccggatcgtcagttcttgaaaaacgggatgcggaagcacacgttcaaaatcttcctcgtttaatgatgaaataactgcggtcagctgctgtcttgccgtatctaattcttgttttgcttcaatgactgagattcggttttgctcaggttcgaggtgtgacggcgccggccgtttatttgatctgtcctctataaactccatcggtttgtcttcgatttttttaaacggtgcgtcttttgcctgctttgataaaagggtctgcgctgtttcgtcaattttctttaaatggtcaaggacttcccgcacgctccactcatcagccgcgggctttcggttgaattcctcatcagagagccctttcagtacttcccaggtctgctgtctggcttcattaaaaatgctcatcctatctcctcctttagagtaaacatatcatatccggattggataatcatgtaatcagccttccttatcagaaaattgaaaccatttacctttacatccgtatataaagtaacactccgacacctcagccgaaaggaggatagaatgtggacatatttcatctgccgtttgaaacggtctatctttacacattgattatttcgggaagtctcacgcttttgattctgttttttcaagatgtgtttcacggcctctcagaagccattcctgtttcatttttaaaccctgcattgattctgtcttttttaacaatcttttcagcctcaggttatatcggcgaaatcgccgctccgctatcaagtcctgtcattgcgttgctttcatttgttctttcggttcttttggtcagcctgcttcacttcttcgtccttgccccgctttcatcagcggaagaatcgctcgcatatcgggagacagatttaaagggcagggtcggcagggtcattacttccgtcccgaaagacggctatggggaagtgatcatagagggaatagggggcgccatttctaaatcagccgtcagctttgatcaagaacagatcagatacggaacggccgtattagtgattgacgtgaaagacggagtgctttttgtgacgccgcatgaaccaatctgatatctaagggggaactgttatgactatgccgattatcattgttatcggaatcgtattctttttactcatcgcacttattgctgtatttattacgaagtaccggacagcggggccggacgaagcccttatcgtgaccggaagttatttgggaaataagaacgtccacattgatgaaggcggaaatcgtctgaaaatcgtccggggcgggggaacgttcgtgctcccggtattccagcaggcagaacctctcagtttactgtcaagcaaacttgatgtctctacacctgaagtctatacagagcaaggggtgccggtaatggccgacggaaccgccattattaaaatcggaggctccatcggtgaaatcgccacagcagctgaacaatttttggggaaatccaaggacgaccgtgagcaggaggcgcgggaggtgctggaaggccatctgcgctccatcctcggctccatgaccgttgaagagatttataaaaacagggaaaagttttctcaggaagtccagcgggtcgcgtctcaggatcttgctaaaatggggctgatgatcgtttcttttacgattaaagacgtccgggataaaaacggctatcttgaatcattaggcaagccgagaatcgcccaagtcaagcgggatgcggacattgccacggcagaagcggataaagagacgaggattaaacgcgcggccgctgataaagacgcaaaaaaatcagagctggagcgggcgacggaaatagctgaagcggaaaaaatcaatcagctgaaaatggcggaatacagaagagagcaggatacagcaaaagccaatgccgaccaggcatatgatcttgaaaccgcaaaagcgcgccagcaggtgacagagcaggaaatgcaaattaaaattattgagcggcaaaagcagattgaattggaggaaaaagaaattctgcgccgtgagcgccaatatgactctgaagtgaagaaaaaagccgatgctgaccgttactcggtggaacaagcggccgcggccgcaaaagcgaagcagctcgccgaagccgatgccgagcagtacagcatcgaagcgatggccaaggcggaagcggaacgcgtgagaattgacggtcttgctaaagcggaggctgaaaaggcgagaggagaaaccgaagcggaagtcatccgcctgaaaggtctcgcagaagcggaagctaaagaaaaaatcgccgacgcattcgaaaaatacgggcaggctgcaatccttgatatgattgtgaaaatgctgcctgaatacgcaaaacaagtctcagcgcctctttcaaacattgataaaattaccgtcgtggatacgggaggaagcggtgaaaacggcggggccaataaagtcacaggctacgcaaccaatttaatggccggtctccaggaaagcttaaaagcatcttccggaatcaatgtaaaagagctgattgagaatttttcaggcaaaggaaacataaaacaaagcataaatgaacttacaaaagaactgagtgattctaacgaacggcacagcccggaataaaaaaacagcaggcgtaaaccgcctgctgtttcagttcgtccgcttagcttcaagaagccgcggcgcagtcatgaataataagataaggacaatggccgaaaggataaaagaaggaatcatgtaagtcgcgttatagacggatgaataaatccagaccggcgtacccttcggagcatagcttccgaaaaagactgctccggagaccacatgcgccgcataccgcagcacactgccggtgaaaacaccgcctataacatacatcgttaaagcgcctctttttttattcaatgccgatgctcgtacaccggaagcgagcaagccgctgaaaccgagaactgcaaatgccgcgatataatcaagaaatagctgcaccgggtgctgcaaaaacaaattgccgatggcgatctggacaatccctgttaaaaagcctgtcgtaagcccggccttcactccccagcggaatgaaatcaaaaaaatcggaatcatcataatagagaccgaacccccttggggcatccggagaaacatgcctgagacaatgtccagaatgacagccgccccggtcataatcgctatttcaattaagcgcacaagctgtgttgaatgattcatagttttccccctggtcagacaaccgtatcaaggataaacaaaaaagcagcgcggggaaggatgggaaaaggtccgcgcgctgcttacataaactgcaaatcatttggctttgccacatccctacgccagcgttaactaacaggttcaaagggtcagaacaaaacgttcactctcagctttaatgctccccttgtggtcatcaagtatttagttcaatcttactatacaagaaaatataccaaaccacaagacagcttatctttctatagaagagaaactgaaataagtatgaaagaaaataattaatgattttttttaaaaaactattgtcatattttcaaaagggtgttatattattaaacgtcgctgatgaacagcagacaacaacgaaaagcttcggaaacaacttaaaaaaagttattgacataaaagaagctgggtggtaagataataaagctgcttcaataagcggtcatgatctttgaaaactaaacaagacaaaacgtacctgttaattcaaagttttaaataaatcgcacagtgatgtgcgtagtcagtcaaactaaggtctgcacgatgcagatcacacagacgttactgcaggatgcagtgaacttagtctgtgttccatttatcggagagtttgatcctggctcaggacgaacgctggcggcgtgcctaatacatgcaagtcgagcggacagatgggagcttgctccctgatgttagcggcggacgggtgagtaacacgtgggtaacctgcctgtaagactgggataactccgggaaaccggggctaataccggatggttgtctgaaccgcatggttcagacataaaaggtggcttcggctaccacttacagatggacccgcggcgcattagctagttggtgaggtaacggctcaccaaggcgacgatgcgtagccgacctgagagggtgatcggccacactgggactgagacacggcccagactcctacgggaggcagcagtagggaatcttccgcaatggacgaaagtctgacggagcaacgccgcgtgagtgatgaaggttttcggatcgtaaagctctgttgttagggaagaacaagtgccgttcaaatagggcggcaccttgacggtacctaaccagaaagccacggctaactacgtgccagcagccgcggtaatacgtaggtggcaagcgttgtccggaattattgggcgtaaagggctcgcaggcggtttcttaagtctgatgtgaaagcccccggctcaaccggggagggtcattggaaactggggaacttgagtgcagaagaggagagtggaattccacgtgtagcggtgaaatgcgtagagatgtggaggaacaccagtggcgaaggcgactctctggtctgtaactgacgctgaggagcgaaagcgtggggagcgaacaggattagataccctggtagtccacgccgtaaacgatgagtgctaagtgttagggggtttccgccccttagtgctgcagctaacgcattaagcactccgcctggggagtacggtcgcaagactgaaactcaaaggaattgacgggggcccgcacaagcggtggagcatgtggtttaattcgaagcaacgcgaagaaccttaccaggtcttgacatcctctgacaatcctagagataggacgtccccttcgggggcagagtgacaggtggtgcatggttgtcgtcagctcgtgtcgtgagatgttgggttaagtcccgcaacgagcgcaacccttgatcttagttgccagcattcagttgggcactctaaggtgactgccggtgacaaaccggaggaaggtggggatgacgtcaaatcatcatgccccttatgacctgggctacacacgtgctacaatggacagaacaaagggcagcgaaaccgcgaggttaagccaatcccacaaatctgttctcagttcggatcgcagtctgcaactcgactgcgtgaagctggaatcgctagtaatcgcggatcagcatgccgcggtgaatacgttcccgggccttgtacacaccgcccgtcacaccacgagagtttgtaacacccgaagtcggtgaggtaacctttatggagccagccgccgaaggtgggacagatgattggggtgaagtcgtaacaaggtagccgtatcggaaggtgcggctggatcacctcctttctaaggattttaacggaatataagaccttgggtcttataaacagaacgttccctgtcttgtttagttttgaaggatcattccttcaaaacataggaacacctgctaaatgcgccacttcctgtggcaacgcatgtgttagcatgtcctatgcgttgttctttgaaaactagataacagaagtaattcacattcaattagtaatgcaagatatcacgtagtgattctttttaacggttaagttagaaagggcgcacggtggatgccttggcactaggagccgatgaaggacgggacgaacaccgatatgcttcggggagctgtaagcaagctttgatccggagatttccgaatggggaaacccaccactcgtaatggagtggtatccatatctgaatacataggatatgagaaggcagacccggggaactgaaacatctaagtacccggaggaagagaaagcaaatgcgattccctgagtagcggcgagcgaaacgggaccagcccaaaccaagaggcttgcctcttggggttgtaggacactctgtacggagttacaaaggaacgaggtagatgaagaggtctggaaaggcccgccataggaggtaacagccctgtagtcaaaacttcgttctctcctgagtggatcctgagtacggcggaacacgtgaaattccgtcggaatccgggaggaccatctcccaaggctaaatactccctagtgaccgatagtgaaccagtaccgtgagggaaaggtgaaaagcaccccggaaggggagtgaaagagatcctgaaaccgtgtgcctacaagtagtcagagcccgttaacgggtgatggcgtgccttttgtagaatgaaccggcgagttacgatcccgtgcaaggttaagcagaagatgcggagccgcagcgaaagcgagtctgaatagggcgaattgagtacgtggtcgtagacccgaaaccaggtgatctacccatgtccagggtgaagttcaggtaacactgaatggaggcccgaacccacgcacgttgaaaagtgcggggatgaggtgtgggtaggggtgaaatgccaatcgaacctggagatagctggttctctccgaaatagctttagggctagcctcaaggtaagagtctcggaggtagagcactgattggactaggggcccctaccgggttaccgaattcagtcaaactccgaatgccgatgacttatccttgggagtcagactgcgagtgataagatccgtagtcgaaagggaaacagcccagaccgccagctaaggtcccaaagtatacgttaagtggaaaaggatgtggagttgcttagacaaccaggatgttggcttagaagcagccaccatttaaagagtgcgtaatagctcactggtcgagtgactctgcgccgaaaatgtaccggggctaaacgtatcaccgaagctgcggactgttcttcgaacagtggtaggagagcgttctaagggctgtgaagcaagaccggaaggacttgtggagcgcttagaagtgagaatgccggtatgagtagcgaaagaggggtgagaatcccctccaccgaatgcctaaggtttcctgaggaaggctcgtccgctcagggttagtcgggacctaagccgaggccgaaaggcgtaggcgatggataacaggttgatattcctgtaccacctcctcaccatttgagcaatggggggacgcaggaggatagggtaagcgcggtattggatatccgcgtccaagcagttaggctgggaaataggcaaatccgtttcccgtgaaggctgagctgtgatggcgagcgaattatagtagcgaagttcctgattccacactgccaagaaaagcctctagcgaggtgagaggtgcccgtaccgcaaaccgacacaggtaggcgaggagagaatcctaaggtgatcgagagaactctcgttaaggaactcggcaaaatgaccccgtaacttcgggagaaggggtgctctgttagggtgcaagcccgagagagccgcagtgaataggcccaggcgactgtttagcaaaaacacaggtctctgcgaagccgtaaggcgaagtataggggctgacgcctgcccggtgctggaaggttaagaggagcgcttagcgtaagcgaaggtgcgaattgaagccccagtaaacggcggccgtaactataacggtcctaaggtagcgaaattccttgtcgggtaagttccgacccgcacgaaaggcgcaacgatctgggcactgtctcaacgagagactcggtgaaattatagtacctgtgaagatgcaggttacccgcgacaggacggaaagaccccgtggagctttactgcagcctgatattgaatgttggtacagcttgtacaggataggtaggagccttggaaaccggagcgccagcttcggtggaggcatcggtgggatactaccctggctgtattgaccttctaacccgccgcccttatcgggcggggagacagtgtcaggtgggcagtttgactggggcggtcgcctcctaaaaggtaacggaggcgcccaaaggttccctcagaatggttggaaatcattcgcagagtgtaaaggcacaagggagcttgactgcgagacctacaagtcgagcagggacgaaagtcgggcttagtgatccggtggttccgcatggaagggccatcgctcaacggataaaagctaccccggggataacaggcttatctcccccaagagtccacatcgacggggaggtttggcacctcgatgtcggctcatcgcatcctggggctgtagtcggtcccaagggttgggctgttcgcccattaaagcggtacgcgagctgggttcagaacgtcgtgagacagttcggtccctatccgtcgcgggcgcaggaaatttgagaggagctgtccttagtacgagaggaccgggatggacgcaccgctggtgtaccagttgttctgccaagggcatcgctgggtagctatgtgcggacgggataagtgctgaaagcatctaagcatgaagcccccctcaagatgagatttcccattccgcaaggaagtaagatccctgaaagatgatcaggttgataggtctgaggtggaagtgtggcgacacatggagctgacagatactaatcgatcgaggacttaaccaatttgaatgtatgcttactgttatctagttttgagagaacactctcaatggtttggtggcgatagcgaagaggtcacacccgttcccatgccgaacacggaagttaagctcttcagcgccgatggtagtcgggggtttccccctgtgagagtaggacgccgccaagccattacacgtaagtgtaatatacggaggattagctcagctgggagagcatctgccttacaagcagagggtcggcggttcgagcccgtcatcctccaccattccaatcatacataagttggcgtattaggccggtgtagctcaattggtagagcaactgacttgtaatcagtaggttgggggttcaagtcctcttgccggcaccacttttatatgttatactatataagtctcttgtaataagagccattagctcagttggtagagcatctgacttttaatcagagggtcgaaggttcgagtccttcatggctcaccatgtttttcttgcggatgtggcggaattggcagacgcgctagaatcaggctctagtgtctttacagacgtgggggttcaagtcccttcatccgcattgccaaacgcggaagtagttcagtggtagaacatcaccttgccaaggtgggggtcgcgggttcgaatcccgtcttccgctccaactatactataccatccatgccggggtggtggaattggcagacacacaggacttaaaatcctgcggtaggtgactaccgtgccggttcaagtccggccctcggcacttattgttgcgcccgtagctcaattggatagagcgtttgactacggatcaaaaggttaggggttcgactcctctcgggcgcgccatacatacttttgaaaaacgggaagtagctcagcttggtagagcacatggtttgggaccatggggtcgcaggttcgaatcctgtcttcccgaccactttggggccttagctcagctgggagagcgcctgctttgcacgcaggaggtcagcggttcgatcccgctaggctccacttgattttaattgtttttggcggtgtagctcagctggctagagcgtacggttcatacccgtgaggtcgggggttcgatcccctccgccgctaccattggacctttagctcagttggttagagcagacggctcataaccgtccggtcgtaggttcgagtcctacaaggtccaccacttatacggaggaatacccaagtctggctgaagggatcggtcttgaaaaccgacaggggtgtcaaagcccgcgggggttcgaatccctcttcctccgccatatctaatttaattatcatcgcggggtggagcagttcggtagctcgtcgggctcataacccgaaggtcgcaggttcaaatcctgcccccgcaaccaaaaaatggtccggtagttcagttggttagaatgcctgcctgtcacgcaggaggtcgcgggttcgagtcccgtccggaccgccatttataaaaaggctcggtagctcagttggtagagcaacggactgaaaatccgtgtgtcggcggttcgattccgtcccgagccaccatttaatttaatattgttttggcggttgtggcgaagtggttaacgcaccagattgtggctctggcactcgtgggttcgattcccatcaatcgccccaaacaacatgcgggtgtagtttagtggtaaaacctcagccttccaagctgatgtcgtgggttcgattcccatcacccgctccatttttatattgtcatgggcctgtagctcagctggttagagcgcacgcctgataagcgtgaggtcggtggttcgagtccactcaggcccaccatgatgatttttccacagtagctcagtggtagagctatcggctgttaaccgatcggtcgcaggttcgaatcctgcctgtggagccatacggagaagtactcaagtggctgaagaggcgcccctgctaagggtgtaggtcgtgtaagcggcgcgagggttcaaatccctccttctccgccataaggcccgttggtcaagcggttaagacaccgccctttcacggcggtaacacgggttcgaatcccgtacgggtcattaaaaaaaccttgcatagtatgcaaggttttttattatgcgttcatagcgtaaatggtaaaagacaggtatgtggcaaaagcgctccataataaataaggaaccagaagccaggctgaagctttactgtatttaccggcaatgagcaacagaatgagtgttgtcacagccacaagcaggcaatcgatagatgcagcaagcaaatttttctgtgtgaattgaaaatagctgaatccttgattcacgatataattgatgagaagcatcacccaaaaagctttggattctttacatgaaaactttgcatatattaaggctgctgagagcgaaataagcgcaaacaaaaccgcccatatgatgccgatcactgatccgcccagcgtccagtcaggtttttgcagcgcgtcgtaccattcccggtcgatgggaaagagaaaccctgctaaagaaaacaagacatatgtaatgataaatacaataatcgcaccgatatacttctttttcatttgttccctccgtcattcaatgtcaatacgttagttccctttcttggaaagattaaaccgttcaaaaggttcatgcaccattaagtgtatgagttttcggtgtgaaaatgcagcaaaccaattatttgtattcaaaaaccccggcctgccggggttttaatcagcatgaaggtcgccaaaggtcgtcataattccttcttcgtccagttcctgctcatatttttcgtgtgccttgcttggatacacggaaatgttttttccggtaatatctgtcgcgataaagttttcataatcctcagcatagccgatgttttcttctgagttcattgtcatatccccatagctgagcggcggatcttctaaatcctgaggcgtttctgagtttccgtatccctcaacatcctgataagcatcttcactatcgtaagccgcccggattgattcatcatcatcaaattcaaactgtccgaacggtgtttcctcttcaatcggcctgtctttggaaacggcatcctgcgaggaatattccgccaatgtcgtagccgtcggcagagcttcaagtctgtcataaggaatgtccttgccgctgacttcacatgtgccgtatgtgccgttttcaatttgtttcagagagtaatcaatatcgcgaaggtgctccctttcatggtcgagcagagccaggtctttttcccgctcgtataattcggtcgcctgatcgccgggatgattgtcataggaagacaattcgccggatgattgatacgggaattcatcagttaactgaaattgatcattttctttaaagcggcttaaaatatcatctctggcttcttccaattctttttttaagtgtgtgatctgttcgtttgtaagcacatcaatccctcgtttctatgtgatgcttactgttagtatgaacgtttttacgcagaaaaatggtggataaaaatagtcattttcccacgaggaagtaaaaggatacagtgattgccgagagtggggaaagaaaattcaagtttgtttctttattcatttgcgcaaaaaggtttataataagaaatgcaggcattttgtcgtgctcaaatctgtgtgtttgacacaaattcatcacaggtgtattgtattaaaagcatttaacggattatggaggaatgtctcatggtgacaacggtgcagcatacgttccgagaggaagcagatcatgcattacataaagccaaacaagtcaaccatgctgtcttattgagctattcaagacgtattgcgtctttagaccctctatcatttttcaaagacggagcaaaaaaatataaaggcaaacgatttttttggtcagaacccggtagtgaattaacaatagtcggtcttggcacagaagcgctgttccaatcgaatgaaaaaaatggaaaacgttatcacgacgtttttgaacaatgggagcgctttaaaaagacggcttttcatattcatgaagaagaagaggcggcgcataccgcggtcggccctgtcttattcggcggtttttcatttaatcccgctgaagagagaggagacgaatggaacgggtttgaagaaggaatgttctttatcccctcactcatgctgacaaagacggcagacggcgattatttaaccgtcaatcaatgggcggcagacggtaatcaggcagaagatacgctgaaacgtctgaaatctttttcagaagcttttgcagtttcttcaattgagtatgaagaatatcctgttttaacaaaagcggaagaacttgatgtggaaaactggcttgaagccattaaaacagcaacaaatgatatgaaggcaaatcaatatgataaagtcgtgctggcaagggaagtcgttttgtcatatgatgggcctattccggcggagagcgttgtccgcaagcttttgacggaccaaacgacaagctatgtttttgcgattgagcagggagataaatgctttgtcggcgcttcaccggaacggctgatcaaaaaatcaggcaaagacgttatgtccacctgtctggcaggttcaattaagcgcggagaaaatcaacaagaagatgaccgtctcggcaaagagctgctgcatgacgaaaaaaatctcgcggaacatgattttgtggttaagatgatacacgattctttcttgtcgagctgcagtgatgtgaaaaagcctgcaggcccgcaattatataaaacaaaaagtgttcagcatctatatacgccgatcacaggcaatctgaaaacgtccgcttcgctgtttgatttaattgaaaagctgcatcccactccggcattgggaggagctcctcagcagaaagctgttgaagttatcgctgatattgaaccgatgacacgcggatggtatgcggctccgatcggctggatggacggcagggaaaacggagaatttgtcgtggctatccgatcagggctgattgaaggcaaaagtgcgcggcttttcgcaggctgcggcattgttgaagattcagatccgcaatcagaatatgaagaaacacaaattaaactaaagccgatgatctctgctttaggaggtgaaaggctttgacaaacccgattacacattatatcggaagctttattgatgaattcgcgctatcgggtgtcaccgacgcggttgtttgcccgggatcgaggtcaactcccctggcggttttggcggcggcccacccggatattcaagtccatatacagattgatgaacgatccgcaggttttttcgcactcggtcttgcaaaagcccgccagcgtccggtcatgctgatttgtacgtcaggaacggcagcggctaacttctatccggccgtgattgaagctcattattcaagagtgcctcttattgtcctgactgctgaccggcctcatgaattgagggaagtgggggcgcctcaggcgattaaccagcattttctgttcggtaactttgttaagtttttcacagactcagctcttcctgaggaaaaacctcaaatgcttagctatatcagaacattggccggcagatccgtaagtgaagccgggaagcgcccgatggggccagtccatatcaatgtgccgctcagagagcctttgatgccggatttatcagccggaccttttgaaagaatgagaaaggggaagcacgtctcagtcacaacagggattcagtcagctgatcaagactctctctgtcatattacagagcgtctcgcgggtaccgaaagaggtatgatcgtctgcggcgaaattcacggtgaagcagaaaagcagcaaatcatcgcgcttgccgagatgcttcagttcccgattttggctgatccgctttcaaacctccgaaacggggagcatgataagacgctgattattgatgcttatgactcgttcttaaaagatgaagaaataaaagaggcgctgcgccctgacgctgtgatccgcttcggtccgatgccggtttccaaaccgctctttttatggctcagagacgatcctgccattgagcagtttatcgtcgatgaagacggaggatggagagatcccacccaggccggcgcgcatatgattcattgccatccgtctgtgtttttggaagcggtccgttcagctgaaaccggaaaacggccgtccggatggcttgagaaatggcaatttgtcaatgaccggttccggagtcatttacaggccgcgagcatggatgatttatcatttgaaggaaatgtatatcgtcagcttcagcaccttgtccctgaaggcagttcgatttttgtcggcaacagcatgccgatccgcgacgtggatactttctttgaaaaacaagatcgttccttccgtgtctatgccaaccgcggcgctaacggcattgacggagttgtctcctcggctatgggactgtgtgaaggtacaaaagctcctgtcacgcttgtcattggagatttatcgttttatcatgatttaaacgggctgttagcggctaaaaaacttggaattccgcttacggttattttaataaacaatgatggcggcgggattttctcgtttttgccgcaggcatctgataagactcattttgaagaactgttcggtacgccgacgggtcttgatttccggcatgccgccgcactgtatggcgggacgtatacttgtcctgagacatgggaagcatttaaggatgcgtatcagccgcaggcggacaagcccggacttcatataatcgagctgaaaacagatcggacatcaagagttcaattccatcgcgatctgctgcaggccgcagtgcgggaagtgaaaaaagaatggaaactgtaacagttaaaacggccgacggcgtatgctatcgtgctgctgatagcggacacggacacgaatcgtctgaagctattgtttgtctgcatggatttacgggcagcaaagaatcatggatgtttttacgcggcatgtttcccggcgagcgaatggtgatgattgactgcctgggtcacggggagacagacgcgcctgtgcaagcggcaaggtatagtgcgagccggcaggttgcggaccttgccgccgtttttgatcaattaaaacttcacaaagtgaaacttattggttattctatggggggaagacttgcgtattcctttgcacaggcatttccgcatcgggtgtcagcgcttgttttggaaagtacaaccccgggcctcagcacgcttcaggaacgcaaaaaacggattcagtcagaccggaagcttgctgactttatattgcgggaaggtgtaacatcgtttgttgattattgggagagcattccgttgtttgccacgcagctttctcttccggacagcgtaaaggcgtccatccgtgccggcaggctgaagaataatccgtccggacttgcaggaagcctgctcggaatggggacaggctcacagccttcctggtgggaggcattacaccgcatcaaggcgcccgtcctgctcatatgcggtgaatgggatgaaaagttttgcgctattaatcaaaaggtgcataacctgctcccatcaagtaaaatagaggttgtcaaacaggcggggcacacggtacatgtggaacagccgcgaatttttggtaagatagtaagtgagtttttatacggcttgtaaagcataaagaaaatagcttttcggccggactcaggcaaaaatgaaggaggtcatatcaatggctgcagaatggaaaagtgaacgtcagtacgatgaaatcctgtacgagacgtataacggtattgcaaaaataacaattaaccgcccggaggtacataacgcatttactcctaagacggtatcagaaatgattgacgcgtttgcttgtgcgcgtgatgactccaatattggtgtcatcgttcttgcgggagcgggagataaagcattctgttcaggcggagaccaaaaagtccgcggtcacggcggatatgtcggagacgatcaaatcccgcgtctgaatgtgcttgatcttcagcgtttgatccgtgtgattcctaaaccggtcgtagcgatggtatcaggctatgccatcggcggaggccatgtgcttcatatcgtctgtgatttaacgattgcggccgataacgcgattttcggtcaaaccggcccgaaagtgggtagctttgatgccggttacggctcaggttacctggcgcgtatcgtcggacataagaaagcccgtgaaatctggtacctgtgccgtcaatacaacgcgcaggaagcgctcgacatggggcttgtcaatacggttgtcccattagagaaacttgaagaggaaacaattaaatggtgtgaagaaatgcttgagaaaagccctacagcccttcgtttccttaaagcggcatttaacgctgatacagacggcctcgccggaattcagcaatttgcaggagatgcaacgcttctttattacacgactgacgaagcgaaagaaggccgtgattcctttaaagagaaacgcagtcccgatttcggtcaattccctcgttttccgtgatcagatgacactacgaaacagcttgagccgctctggtccaagctgttttcttttcaaaaacagtacttttacctcggagatgataacatgctgacagaacagccgaattggctcattcaaagggctcagctgacaccggagagaatcgctctcatatttgaaaacaaacagatgacattcagagaattatatcatgcttctaaacaaatggccgcgcggctgtccaaatactgctcgcttaaaaaaggagacagggccgcgattttgctttctaacagaccggaaatggtttatgccgttcacgcctgcttcttattaggggcggaagctgtgctgttgaatacgaagctctcaaaacaggaacggttgtttcagctcgaagattcacaggcaaagcttttattgacggaggacggtttttgccgcgaagaatatgaatctgcggtcgccaccgcagatgtggacgagctgcaggctgaagaggcgggtgacatggagccggaagcttatgtaacgcttgatgatacggcgactcttatgtatacgtcaggaacaacaggaaggccgaaaggggtgcagcagactttcggtaatcattattccagcgctgtatcgtctgcgctgaatctgggggtcacggagcgggaccgctggcttattgcgctgccgctgtttcatatcagcggtctgtctgcgctgtttaagtcggtcatttacggcatgcccgtcgtgcttcatcaaaaattctctgtcactgatgtgctggacagcatcagctcccatcaggtcacgatcatttcagcggtgcagaccatgctctcgggcctgcttgcggaaactgaacaatgtcctgaatcactgcgctgcattctgcttggcgggggtccggcaccgctgccgctccttgaagaatgccgcaggaaacaatttccggtattccaatcttacggcttgactgaaacctgctcacagattgtcacactttctccggaattcagcatggacaagctcggctcggccggtaaaccgctgttttcatgcgaaattagaattgaaaaagacggaaacccttgtgcgccgtttgaacatggtgaaattacggtgaaaggcccgaatgtaatgaaagggtattatcatcgtgacgacgcgaaccaggccgcttttcataatggatggttcaaaacgggcgatcttggctatttggatgatgaagggtttttatacgtgctggacaggcggtcggacctcatcatttcaggcggagagaacatctaccccgcagaagtggaagcggcgctgcttgcccatccggctgtagcggaggccggtgtttcgggagccgaagatccgaagtgggggaaagtgccgcatgcttttctcgtgctgacttcttctgtcagttctgaggagctgaccgccttttgccgtgagcggcttgcaaaatataaaataccagctgcttttttcaaggttgacgggctcccgcggaacgcgtccaataaactgatgaggcatcggctgaatgagcttcgtaaaggagaattgtcatgattaagattgaaaaaatcaccctttatcatgtaagtatgaggctgaaaaaaccgtttaaaacaagtattgaaacgctgcaggatcgtaaatttttgatcgtggaagcgatcgacgaaaccgggagaaccggctggggggaggtatcggcgttttcttctccgtggtatacagaagaaacgattcagacatgcgcgcatatgctgagagattttttcatcccaaatgtcgtaggccgcgcgtttttccatccgtcagaagtgcctgacagtctcgcgcgtttcaaaggaaaccgcatggcaaaagcggggcttgaatcagccgtgtgggatctatatgccaagaaaaaggggatatctctcgcagaagccttagggggcaaaagagataaagtgcccgccggcgtggcggtgggtctggcttcggctgatgagatgcttcgggaaattgagcaatacgtaaaagaaggttatcaacgtataaaaataaaaattcagcccggccatgacgttgatctggtcagagccatccgcagccgttttccgaacgtgccgctgatggcggatgccaactcggcttatgaactgaaagacatcagcaggctgaaagagttggatgaattccagctcatgatgatagaacagccgcttcaggcagatgatattgtcgatcaccgccacctgcagaaacacttaagaaccgcggtatgccttgatgaaagcatatgctcttatgatgacgcaaggcgggcgattgagcttgggagctgtaaaatcattaacataaaaccggcgcgtgtaggaggcctgacagaggcattaaaaatacatgacttatgcagagagcatcacatgccggtttggtgcggcggaatgtttgaaaccggcatttcgagagcgcagacagtcgcgcttgcttcgctgccgcaatttacgataccgggtgatatttcctcatcagaccgatactgggaggaggatattgtcactcccgatatccgtatcgaagagggattcatctctgtcccggacggtcccggactaggtgttgaagtcaatcaggaaataatgagaaaatacgtcacccaaatggacgtttttacgacaaacaactgataaaaagacatttcagcgagttgagctgcctgtacgctgctgttatattgaagctgttcattatcaccccttcccccgtttgaaccggctgtatcagccggtttttttaataggcggatgcgatgatttttttattcttcaaacagtgccggctttacaacgcaggtgctgctttccggctggggcaaacatgtacatcttgataaaaaattctgagcttgtcatgaatgcgatactgattgtaccgtctgccgcctatatttgccgccgaaccgcctttttgccatgcttctcatccgcgcggttttctccggctcagggaggcttgcggcggaaatgaaaaagagctgtataaaacagctcttttcttttataaatcttgcggtttaaaggttttgcaatccgtttcttcacttttttcagcggtttcgcctgtatggctgaccacataaatagcgtcggccgtgcatttgtttcctctgccccaatatgaacagttattgacttcacacagaattttttggtccatgctggctcccctccaagataaaaggtacgccattagtatgagccgccctgatttttgttattcctcctggcggatataacgtctgtctttcataaagagcttccagaagaaataaaacccggggaacaaaatgatgaaagcgacgatatacgtcataaacagcgccctgaaggttgccggctccgtaaatcctgacatgaccgtaatatccggataaatcatataaggaagatgagcccgtccgtatgcatagcttgccagaaagtattggagcgcaatggcgatcatggcgattctcggtttgccgaggttgcggccgaagcgcttattcggcaaaaacagagccacgccggcaatgataaatgtaatgacagacagaatgagccatgtcttgtctttcatcatccccgtatacagccagccggcttcagagcgtaatgtcagcataatgaagaaggcaaacagaagcgacagcggccctgttattaaagagctccgtctgtagatgcggtacgcatgctcctcttccgcaacatttgaaaaatcggccagaagcagtgaagataaaaataaagtgcttaaaatggcaaagccgataaacgcatacgcattaagacttgtaaagacatttgccaaattcaggtgatacactccgcccgtcttctcaataaaccctccgtgtgtgaccggaaggaccaaaatcagcacagcgggaataatgaagcctgaaattccggagatatatctcatgatttttctttccttcgccgtattggagaagacgagaaagccgctgcggatggctaagagcagcaaaataatacttcccgggatcaataaaacggttcccagcacgaaggttgcccctggaaagaagctgaatagggcgacaacgatcgcgacgataaagacgttggtcacttcccatgtcggggacaaataacggttggcgatgtttgtcgcctttgtttgttctttatttaaatatatcatcgaccaaaagccggctccgaagtccatcgttgccatgaccgcgtagataaacacgaagccccatacgattgatatcgcaatgagagcatccatggtaatgtccatttcaattcagccctttctattgttaggattccgccgcttttacatcctcctcaacaggatgtttgcggaaataataaagcagcacataaatgactgcggctgccaaaatggcgtaaaccactgtgaacaggatgaacagcaaaccgattgaaccggttgtcgtgacgacatcagacgttttcaggagatggtaaatcacccatggctgccgccccgtacaagcgaatatccacccgaattcaattccgatcagactgagcggtcctgcggttaaaaataaaatcaaaagccaagtcggaaagctgtctttctttaaaatttttctccacacgatgccgatgatggagtacaaaatgagcagcatcccgatgccgaccattccgttaaacagtgtatggatgaataaaggcggccactcgtctttcggaaacgcgttcaatcctttgacgacggtatcaaagctgtttgcggccaaaaagcttaaagcccacggcacttctatcgcccattttactttttcttcttttgcatcagtaaaacccccgatcgcaagcggagcgtgtgatctagtttcaaacagcccttctgcgcccgcaagcttctcaggctggtattcgtaaagaagctgggctgactcgtgaccgtttaaagaagcaataatagagaatatcccgccgatcgttaaagcgagcagcagcgcttttcggtgaaagcggtatacctgctcctgttttctcgttctcagcattttataagccgcaactgacgcgacgataaatgcaccggtcatgaaagccgtcagtacgacatggcccgcggtggtgaaaaagcttggattaaaaaacgctgcccacggttcgacgtcagtgattttgccgtttaaaattttaaagccggccggcgttccttcaaatgcgtgaacatttgtgattaagacggcggatgccgcggcgccgatcaaaacgaaaataacggcaatgatgcgcatcgccggagtcagccggtcagcggcgtagacataaatggacataaacagcgcttcgataaagaaagcataaatttcaatctgaaacggaagtgacatcaccctgccgatgatctccatgaatccgggccacaaaagggcaagctgtgtacccgcgatcgttccggtcggtatcgccacgccgagcagaacagcctgcgccttcgtccaccttttcgccataatggcataatgcggatcttttgttttttgataaatcaattcggccattaaaatcatcagaggcaagccgacaccaagcgtcgcaaaaataatatgaaagcccatggttgtcccgaacagacttctggctaatactaaatcatccacgatcataaaccgcctttctaaattaccgttttatgtaatgtggttatattatttgctgaagcgattagattattcttccgattccatatatgtgcagggtttagaaatcaagggatcagggcatatatgattgacaagcgcctatttaaggtttagaataaaacgtaattattacgatttaagaaagggagatcaccatgaaaaaagatattcatccggataaccaccaagtgatttttcaagatgtgaacagcggctaccgctttttaagccattctacgaaaacgtcagaggaaacggcagagtgggaagacggaaaaacatacccgctgattaaagtggaagtcagctcagatacgcatccgttttatacgggccgccaaaaattcaacgaaaaaggcgggagagtcgaacagttcaacaaaaaatacaatatggggaaataagacaagcccaatagggtttgtcttatttattgagcactttatcatctcgtgcggggagtgacgaaatgacccgccttatgttatattgtgaataaaaaagcagaaaggaaacaccaagatgagtcttctaaacgatatcatgcaatttaatgagcagttcactaaaaacaaagattatgaaaaataccaaacatctaaattcccggataaaaagatggcaattttgtcctgtatggacacacgtcttgtagaattgcttccgcatgcgatgaacatgcgaaacggcgatgtgaaaattattaaaagtgccggcgcgcttgtcgcccacccgttcggaagcatcatgcgcagccttttagtggccgtatacgaattaaacgctgatgaagtctgcgttatcggccaccatgattgcggcatgagcaaaatcaacagcgaggatatgcttgataaaattatcgaccgcggtattccgaaagagcggattgacatgctgaagcactcaggtgttgatcttgatcaatggctgaaaagctttgattcagtagaagcgagtgttacagacagcgtaaacgtcattaaacaccatccgctattccctgacaatgtcccggtgcacggtctggtgattgatcctgaaaccggtaaacttgatctggtgatcgacggctaccagcatatggactaatgttttcgttttttgtccggtacgggatcaacaccgcccggatgaaaagggtggcactttaaaatccgcttcagtgtcagccatccgccttttaatgcgccgtgagtcttgacggcttcgattccgtactgtgaacacgtcggataaaagcggcatgacggcggcgtcagcggagagatgaacttctggtatccgcggatgagcgcaatcattatggttttcattaaaaaaccacctttctgatgctagtatagaaaaaaaatttcagattgaaaagctttcgccacaattcttatcggaaaactgtgttataatggatgcatattctgaaaaaaagggagtgccattatgccttcagtagaaagttttgagctagaccataatgcggttgtggctccgtatgtaagacattgcggagtgcataaagtcggaacagacggcgtcgtgaataagtttgacattcgcttctgccagccgaacaaacaggcgatgaagccggatacgattcatacgcttgagcacttgcttgcgtttacgattcgcacacattctgagaaatacgatcacttcgacatcatagatatctcaccgatgggctgccagacaggctattatcttgttgtcagcggcgagcctacagcggaagaaattgtagacctgctagacgctacgctgaaagaagccatcgatattacggagattccggcggccaacgaaaaacagtgcggccaggcgaaacttcatgatttagaaggcgcgaaacggctgatgcgtttctggctgtcacaagataaagaagatttgctgaaagtgttcggataaaaaacaggcctttttgctgacatgcaaaaaggcttttttacatatttctaaaaaatgtcacaccttatgtgtaagcgtttgctaaaatagaagcaaacatgaaggagtgatgggatgaaacgggctgtattggcaggtatgtgcggtatggtatttctattatcttcctgcgggggcaattcggacaaaaccgccgcggatgaggagcctaaagcgcttgaggtcaagcttacaggaccggaaacggcagcaccgcatgaaaaaacggaatacaaggcggaggttttttacggcggcaagcgtgtcacggatgcggatgaagtcatgtttgaagtatggaaagaaggaaaaaaaggcagcagcaaaacaagcaaggccaaggaggaaaaaggggcgtatcacctgcggactgaatttgatgaagagggtgtgtataccgttcaatcccacgtaacggcaaaacagcagcataatatgccgactgtaaaagtacgtgtcggggatgctgaagctgccgatgattcctccggccatgaggaacagacgcatcatcattaaggattgtttttatccgtcaagccttttgatgcgtcctccggcgggtcaatcgtatgttttacgttataagctcttacagtcgaccagatggataaaagcagcacggcgagcacgataagaaagccgaagctcagaagaagcagcatgaaatccctcctttttaacaaatcataacatattttccatccgtaaaatcaagggctaaaaatttatgttttaacacacgatatatagggtatatcaatagtaaatcaaaggaggaagataggcatgtcagaaaaactattggaagcggtcaataaacaagttgcaaactggacggtcatgtatgtgaaattacataactatcattggtacgtcaaagggaaggactttttcacattgcacgaaaagttcgaggagctgtataacgaaacggctacatatattgatgatctggcagaacgtctgctggcattgaacggcaagccgatcggcacaatgacggaatcattgaagagtgcttctataaaagaggcggaaggcaatgagagcgcagaacaaatggtacagaacatttatgatgatttcactgtcattgcggaagagctgaaaagcggcatggatctcgcagatgaggtcggagacgaaacgaccggagatatgctgcttgccattcaccagaatatcgaaaaacataattggatgctgaaagcgtatttaggataatcaacaagggaagaccggggctataaagcactcggtcttttatttggctgccgaagagaggtgttgtccatttttctgaaaaatccagtccgttccattcacttttcatagaataatgtaaggccgtttctgtgaaaggatgttggatcaagtgggcaaagactttggcatcttttcgttttttgcagtgatcgtgtcggcagcggggtttttctttggcggttttcagtattcgtttctgattttgctatcggtcatggcgattgagtttatcagtacaagcttaaaagaatctcttttgcagcagctgagcgcaagaaagctttttgcgcggctggtcaaaaaaatcgtgaccctggcattagtctcagtttgccatttttttgatcagctgcttcattcagaaggcgccatccgcaatttggctattatgttttatatcttatacgaatcggttcagatcgtgattacggcaagctcgctgggcatcccggttccgcaggtgctcgtcgacctattggatactttgaaaaataaattcaagcgcaaaccgtaacatttgcttcaaaggaggctatactagcgggtatgatggttttcctctgaatttttgataaagggcttccgaacaaacgcaactgtggtatgatgtatggaagatatgaaggaacggattagagggataaacatgtacgagtttaaagactattatcagaatactgttcagctctcctttgaacaccagcctttttcagacagcccgaagcatgtatgggtcatatgccgatatggagataagtggcttttgactgagcacgaagaccgggggtttgaatttccgggcggaaaagtggagccgatggaatgtgcggaggaagcggccctgcgcgaggtgaaagaagaaaccggcgccgcggtaagacatctgaagtacgtcggacagtataaagttctcggcagggaaaaggtaatcgtgaagaatatttattttgccgatattgaaaagcttgaaaaacaggctgactattttgaaacaaaggggccggtgctgttcagcgaactgccggagaatctcccccgaaataaaaaattcagtttcattatgaaagattcggtgcttccgatcagtctgaaaaagctgaaagaggacggcgtatttcaatcataaaaaacggagacccggcgcttacgcacgggtcttttttatatttttcctttcgtccattttctttctaacagttcgactccctgatacatcaatgtcgcaaaaatcgcgatgatcagaaggcttaagaacacaagagtgaaattgaagacctggaatccgtaaatgatcatgtagcccagacctttttcggaaacgagaaactcgccgacgatgacaccgacccaggataaaccgacgttcactttaagcgcggaaataatcgcgggggcgcatgccggcagaatgacttctttaaacatgatgcttcttttcgctccgaaggttttcatcaccttaatatagttttcatccacttcctgaaaagccgtaaagacgacgattgtcgtgataatgacactgatgactgctcccatggcgacaatgcttgtgaaattcggtccgagtgccacgatgagaatcggtccgagtgcgaccttcggcatcgcgtttaaaatgacgaggtacgggtctaaaacccgggcgagtctgtttgaccaccataacagagcggcgaggcatgtgccgagaagcgtgccgagcaaaaagccgagaacggtttctcctaaggttacgccgatgtgcgccgcaagggatccgtccgcaatcttttcaactaaaagcctgcaaacggcggagggtgagctgaagattaacggatcgatccagcccgccctgctcgatatttcccacccggcaaaaaatacgatgaaaatggcggcctgatacgcacggatccggagcttttctttttggtgtcttttcttaaactgctgatgaagctgttcaatcgtgccgctgctgtttttcaagggaattcagctccttccatatggtttgaaacagcggctgaaaggccggatcctgacgcgcgtcaaacggatctaaagccgcgagctccttaggcacggtgaatatttggtggatggtgcccggctgattcgaaaataaatagatcgtatcgctcatggcgatggcttcaccgatatcgtgggtgacgagcacggcggttttttgaaaatcctttaatgttctgaagacaaggttttccaaagaaagcttcgtttgaaagtccagcgcggaaaacggttcatcaaggagcagcagtccagggtccggcgcaagagttctggcaagtgccgcccgctgccgcattccgcctgagagctctttcggatatttcttttcaacgccgattaatccgagcttaggcagaaggctgagaacttcagctcttttttcttctgttaatgtttttgaaatgtgtaaaccgagcagcacgttttcctcaatcgatttccaaggaaataaataatcctgctgaagcatataaccgatttggtgttctttatggttcggcacgcttccttcgatcagcacccggccttgcgcaggggtgataaggccggccagaatggacaggagtgttgtttttccgcatccgctcggcccgagaaaggagatgaaatcccctttttcaatctgaaaatgtatatctttcacggcggttgtcttttctttaagcgagaaataagtatgtgttacatgatccacatgtaaaaaagacattcatgttcctcctattgttctgaggtgacttttttggcgatttttgtgttgacgagtttgctgtacggaatgtgtttcgggagctctccggcttcatccataatagattgaagcagttcccattcatccttttgcagaactgggtctgcagagaatgacttttgttttttatagcgctctatcgatgtttcgataatggccgggtctgtatcggcaaattccttctgaatcgtttttgcgatgtctttggccggatggctttccacccattgctgggcgcgatagatggcgcgggtgaatttttccgccgtcttttcattgtttttcaaataactttcttttgccataaaggttgtgtatggcacttggccggaagcttctccgaaggatgcgacgatatgaccgatgccttctttttcaaattgggatgccgtcggttcaaacagctgcacataatcacccgttccggatgcgaatgcgttggaaatattggcgaaatcaatgttttgaacgaggttaatgtcttttttcggctctatgtgattctttttcaggacgtactcaccggccatttggggcatgccgccttttcgctggccgagaaatgtttttccttttaaatcgttccatttgaatgatttctcatccttccgcgacacgagaaatgtgccatccgtctgcgtcagctgcgcgaaattgatgaccggatcttttgctccctgcgcctccacgtaaatggatgtttcagaaccgaccagcgcgatgtctgacccgtttgacaaaagcgatgtcatcgttttgtctccgccccatgttgtttgaagtgacacttggagcccttcttttttaaagaaatcttttgcttcagcgacatacagaggcgtatagaagatggagtgtgtgacttccgccacctttaccttcgtcagactttcttcctgtctgcaagccggaagaatgagcaggaaaaaggcgcatatgacaaaaacgcagcccgctttgagccatttgttcacggtgtaacctccttgttttaagcgttaaaataaccttttctgctttacatatcgtatgatgggtataaaaaatgtgtgagtgcccatattcacgttgggaaagaataaaaaaactgatgatctaaggaggcgcattgttttgctggtagaaaagaaaaggttcccgtctccgagtccgcatgtccgcctctttgcggtatgctatgagtcagaagggctgaaggtaaaggggctccttgccgagcctgcggcgccgggaacatatgacggttttttatatttgcgcggcggcataaaaaatgtcggcatggtacgccccgggagaatcgttcaattcgcttcccaaggctttgtcgtgtttgcgccttattacagaggcaaccagggcggcgagggaaatgaagattttgcgggagaggacagagaggacgcgttttccgctttccgcctgcttcgggagcatccgaacgtcagggaagggcgggtgcatattttcggtttttcccggggcggaatcatggggcttttgaccgcgattgaaatggggcatcaagcggcttcactcgtttcatggggcggtgtgagcgatatggtgctgacttatgaagagcggaaggatatgcggcggatgatgaagcgggtgatcggcggcacgccgaaaaaggtgccggatgaatacagatggcgttcgccgtttgaaaaagcagaccgcattcaggcccctgtgctgctcatccatggagagaatgatgaaaatgtttcgatcgaacacgcccggatgatcgaggacaagctgaaagaggcggggaaaccggtggaaacttggtattacagcggttttacgcattattttccgccgcaggaaaacagacgcattgtccggcggctggcggaatggatgaagacacggtaagatgcctgatttatgatatgataataaagaataagagaatgaaaggggattttcattttgggaatgcctgttgaatttaataccatgattgtgacaaaaggcaatgaaaaacggatagaggaaaatatctttttattggagaaagagggctaccgcgtctatcctcttgatattccgatggacgtgcgcaaaacgaaaaccggcgagaaatccggcaccggcgaggtccagaagctcgaatgggcgaacggccggacaagcattacatacagactcacttcgcttcattcgacaaactgaaaaaacaaaagccgagggcataaacgcccttggcttttttgattacacgagaggtccgccggttttggcaatcgagtctgcatgggaaaactttttaaagttttctttaaactcattggctaaaaacagcgctttttcgttgtatgcttgtttatcgctccatgtgttttcaggctgaagaacttcatccggcacgcccggaacatgaacgggactgtgcaggccgaaaatgctgtctgccgtcatgtcagtctggttcagtctgccgtcaatagcggccttgaccatcgctcttgtatacgaaagtttcatccgttctccgactccgtaccctccgccggtccagcctgtgttgaccaggaagacttgaacgccgtgttcgtcgattttacgcccgagcatttcggcatatacatgcgccggaagcggaaggaacggtgaaccgaagcacgtcgagaaagtcgtttgcggagatgtcacgccgcgttcggttcccgcgagtttactggtgtatccgcttaagaagtgatacatcgcctgttccttcgtcagtttgctgatcggaggaagcacgccgaatgcgtccgccgttagaaagacgatcgcctgcggatggccggcaatgctcggctgcacgatattgccgatcatctcaatcggatatgcggctcttgtgttttccgtgtagaaggaattgtcgtaatccgcttcacccgttttttcatcaagcacgacattctcaagaacagacccgaagcggatcgcacgaaaaatctgcggttctttttcctcgctcagattgatacatttagcgtaacatccgccttcaatgttgaaaacgccggaatctgaccagccgtgctcgtcatctccgatcagtttgcggtccgcatcggctgaaagcgtcgttttccctgtgccggaaaggccgaaaaacagggcgacatcgcctttttcaccgacgttggctgagcagtgcatcggcagtatatcctgctgcggaagcaggaagttcataatggagaatattgattttttcatttctccggcgtattcggtgcccccgattaaaatgacgcgcttttcgaaagagacaatgataaatgtttccgaatgcgtgccgtccgtctccgggtctgctttaaaatgcggagctgagagaatggtgaaaggctgcgcttgcgggtctctttcatccgtttccggtctgataaacagctggcgcgcgaataaattgtgccacgcaaattcatttacgaccgtaatcggcagtctgtatttttcatccgctcccgcgaatccttcaaacacaaacagttcatcccgctgttttaagtagctgacgactttggcgtacagcttttcaaacgcctcttcagaaatgggctgattcaccgcgccccaatcaatttgattttctgtgctttgttcacggacgataaatttatctttaggtgaccggcctgtatatgcgccggtagtggcgcgtacggcgcccgttgatgtcagcgttccttcatttcggctgatcactttttcggtaagttttggagccgataaattatgatgcacattcggacttgcaagtaatgcttgaagatctgcggttaaatcaactaatttcataaaaaccttcctttgccggtttatttgtatttcgctgaatgtggaattagtataacatatatctgaaaatagtctatactatttacggttttttgtttgtgtttttccattgcttcccgaaataaaggcgcgcaatcgctttaattcatattgacactttccgcccttttacgataagatatttcattgagcggatactcttatcccgagctggcggagggacaggcccgatgaagcccagcaaccggtttctctgtaaaaaagcaggtgaaaacactgtgggaaaccaaggtgctaacctgatgcaaggtttaatattttccttgagcgataagagtgaaaggcacacagaccaaaccctttcctcgagtggaaaaggtttttttatttcataaaatatgccaattaacattctctgatatagtatgacattgtattaagagggagcgagttccgtatcatatgagaaggtcttgcaaaagatcttttttcaggaggaaaagtgaatgagtaaaaaccgtcgactatttacatctgaatctgttactgagggtcatccggacaaaatctgtgaccaaatttctgacagtatcttagatgagattttaaaaaatgacccgaacgcgcgcgtggcctgcgaaacatctgtaacgacaggacttgtgctggtaagcggagagattactacgtcaacatacgttgacattccgaaaacagtccgtgaaacgattaaagaaatcggctacacacgcgccaaatacggatttgatgcggagacttgcgctgttttaacatcaattgatgaacagtctgcggatatcgcaatgggtgtcgatcaggcacttgaagcgcgtgaaggcacaatgagcgatgctgaaatcgaagcaatcggagcgggagaccaaggcctgatgtttggttatgcgtgtaacgaaacgaaagagcttatgccgcttccgatctctttggcgcataaactagcccgccgtttgagcgaagtccgcaaagaagacattcttccgtaccttcgccctgacggcaaaacgcaagttaccgttgaatatgatgaaaacaacaagccggtccgcatcgacgcgatcgttatttcaactcagcaccacccggaaattacgcttgagcagattcagcgcaatctgaaagagcatgtcattaaccctgtcgtgcctgaggaactgatcgatgaagaaacaaaatacttcatcaaccctacgggacgtttcgtaatcggcgggcctcaaggtgatgcgggtcttacgggccgtaaaatcatcgttgacacatacggcggatatgcacgtcacggcggcggcgcattctccggtaaggatgcgacgaaggtagaccgttcagcggcatacgctgcgagatacgtagcgaaaaacatcgtggcagcaggtcttgctgattcttgtgaagtgcagcttgcatacgcaatcggcgtggcacagcctgtttctatttccatcaatacatttgatacaggaaaagcttctgaagaaaaactgatcgaagtcgtacggaataacttcgacctgagacctgccggcattattaaaatgcttgatctgcgccgcccgatctataagcagacagctgcttacggccacttcggacgtcatgatgtggatcttccttgggagcgtactgacaaggcggatgcgcttcgcaaagaagcactaggagaataattttatagccgcttacttaagcggctttccctttttgtagatgctgccatgcttattttttacatagcgtgaaaccaatggcgtaacaaagcgtctataaaaagggggtccaattagaaaattacacttatggaggctatactatgtgtggatttgtcggtgtttttaataagcatccattaactcaaaccgcagatcaagaagagctaatcaaacaaatgaaccaaatgatcgttcaccgcggtcctgacagcgatgggtattatcatgacgagcacgtcggattcggcttcagacggctcagtattattgacgtagaaaacggcggacagcctttatcatatgaagacgaaaaatattggatcatttttaacggcgaaatctataactacattgaattgagagaagagcttgaagcgaaaggctacactttcaatacagattccgataccgaagtgctccttgcgacataccgtcattataaagaagaagccgcttcaaagcttcgcggaatgtttgcgtttttaatctggaacaaagctgaccgcgtcatgtacggcgcgagagacccgttcggaattaaaccgctgtattacacaaccatcggggacaaagtatattttgcatctgaaagaaagagtttaatggccgctcaaaacggtattgatcttgatacagcttctttacagcaatatatgtctttccaattcgttcctgaaccgagcacgcttgacgctgaagtgaaaaaagtcgagccgggcagccagtttacgatccgcccggaaggcgacatcgcgtttaaaacatatttcaaagcgaacttcaagcctgttcagtctgatgaagataaattggtgaaagaagtcagagacgcaatctttgactctgtcaaagttcacatgagaagtgacgttcctgtcggttcgtttctatccggcggtatcgactcttcttttatcgtttcagttgcgaaagaatttcacccgagccttaaaacattttccgtcggttttgagcagcagggctttagtgaggttgacgtagcgaaggaaacggctgccgcgcttggtattgaaaatatcagcaaagtcatttctcctgaggagtatatgaacgagcttccgaaaatcgtctggcactttgatgacccgcttgcagatccggcggcgattcctttgtactttgtcgcgaaagaagcgaaaaagcatgtaacggtcgcgttatccggggaaggcgcggacgagctgttcggcgggtacaatatttaccgcgaaccgctttcgcttaaaccgtttgaacgcattccgtccggtctgaaaaaaatgcttcttcatgtggcgtccgtcatgcctgaaggaatgagagggaaaagcctcttagtccgcggctgcacaccgcttgaggagcgctatatcggtaatgcgaagatttttgaagagcccgtgaaaaaacagctgctcaaacattacaatccagagctttcataccgtgatgtcacgaagccgtactttacggaaagccgttcatacagcgacataaataaaatgcagtatgttgacatccatacgtggatgcgcggcgacatcctgttaaaggctgacaaaatgacgatggccaactcattggaactgcgcgtgccgttccttgataaagtcgtgtttgacgtagcttcaaaaattccggatgaattgaaaacgaaaaacggcacgacgaaataccttctgcgcaaagctgctgaaggggtagtgcctgatcatgtgcttaaccgcaaaaaactcggcttccctgtgccgatccgccactggctgaaaaatgaaatgaacgaatgggttcgcaacatcattcgcgaaagtgaaacagacgcttatattgaaaaggattatgtccttcagcttctggaagatcattgtgccgacagagcggacaacagccgcaaaatctggaccgtgctgatcttcatgatctggcacagcatcaatgtcgaaaaaagactggtgccggaagagctgaatcatcagccgaaagaagtcattttcgtttaatccaaaaggctttcgagttatcgaaagccttttttctattgttttttgtaaaccgtctattccgctctgttttcgacaaagtattacgcaatattcagaaaaaggttataataggactaatcgggtagattccggaaaaagttttctggctatttcgtctcggtttgttgtttctttgtcaaaatcagggggagggagagttatgcaaaacaaagaaaaaacgcttcaccgcggcttggaagagcggcatatctcgcttatgtcgttgggcgccgcgattggagtcgggctgtttctcgggtctgcttctgccataaagcttgccgggccggggattttagccgcttacgcctgcagcggactgattatgttttttattatgcgggcattgggggaaatggcgattcaaaagcctgtagccggttcattcagccggtatgccagagattatatcggcccgcttgccgggtttttaacaggctggaattattggtttttatgggtcgttacctgcatggcggaaatcaccgcggtcggcatttatatgggctactggttccctgacgtgccgtcatggatctgggcgctttgtgcactcgtcattatgacggctgtcaactttctggcggtcaaagcgtacggtgagcttgaattctggtttgcgctcattaaagtcttggcgattctgtcaatgatcgcgatcggtctggtgatgatcgtattcggtctcggaaacggaggcgttgcgctcggaatcagcaatttatggagccacggcggctttttcccgaatgggattaaaggggtgctgctgtcgcttcagatggtcatgtttgcttatctcgggattgagctgatcggtgtcacagccggtgaggtcaaaaatccggaaaaatcactggcgcgggccatagatactgttttttggcgcattctcattttttacgtcggagctttgtttgtcattatgtcaatttatccgtggcaggaaatcggttcaggcggaagcccgtttgttttgacatttgaaaaaatcggaatacccgctgcagccggaatcattaattttgtcgtattgacggcggctctttcttcctgcaacagcgggatcttcagcacggggcgtatgctgttcaatctggcggagcaaaatgaagcgcctaaagcatacggtacggtcacaaaaggcggtgtgccgggaaaagcggtattggtttcagcgggtgcgttatgcatcggcgttttgctgaactacgtggtgccggcgaaagtgtttacgtgggtgacgagcattgcgacgttcggagcaatttggacatggtcgattattttgctttcccaaatgaaataccgtaaaagcttacagccggaagaacggaaaaaactcaaatataaaatgcctttataccccttttcctcatatatctcgctggcatttctggcttttgtcgttgtgctgatggcttttgatgcagagaccagggtggccgtcatcatcggtcctgtctggttcggcatattattagccgcctattacggcaaaggattccataaaagaaaagacatagatctggaaaacggacagacattcgccgaaaaagcgtaaaaaagagcccgctgaaatgggctcttttttcataggatcgggtaaaagggggaagaataaaacaaattcctgaacattttgcttctgtttcctgacaatcgggagaatgcaaatggtttttacttaaataatattttgaaaaatggtacagtagtaaaacaaagctgatcttttttatttctcttgcattgttttatagtatcggcctttttcaacatattccgttctgattctttccatgtcccgtatgtcttcttctgtcagccggcggataacctttgcgggccggccgaacgcaagacagccgggaggaatggttttgcccggaggaacgagacttccggcgccgataaacgcgccttctccgatttccgccccgtcaagaatgacggagcccataccgattaaagcattctttctgatgattgcgctgtgcagtgtaacctgatggccgatcgtgacgtcatcttcaataagaagcgggcggttcgggctttgatgcagacagctcaagtcttgtatgctgactctttttccgatccttgtcggcgcaacatccccccggatgactgccgagaaccaaatgctcgattgttctccgatcacgacgtcgcccgttatgacggcgttatccgcaatgaacgcttcaggatgtacgtcaggcgtaaattgtttataagggtagattatcatgtctcatccttctttctctaaatttatgtaagaggtgaactgcatgtggacttggaaagcagacaggcccgtcggtaccattgtcattatccacggggcgagcgaataccacgggcgttataaatggctcgttgaaatgtggagatcttccggatataacgtggtgatgggcgatttgcccggtcagggaacgtcgacccgcgcccgagggcatattcgctctttccaagaatacattgatgaagtagatatatggattgataaagcgagaacgcttgaagcgcccgttttccttttgggccacagcatgggcggactgattgcgatagaatggtttaagcagcagagaaatccccgcattacggcactcattttatcatcaccttgtctgggtctgcaaataaaagtcaataaagtccttgattttgcgtctaaaggactgaacgtcctcgctccgtccctcagagtggattccggcttatcacctgatatggcaacgaggaatgcggatatgattgaagcggatcaaaacgattctttatatgtcacgaaggtatccgtaagatggtacagagagcttttaaaaaccattgatgccgctatggtgccgactgatgcgtttttaaaggtgccgcttttgcttatgcagggcggtgatgacaaaatcgtcgataaaatgaaagtccgcaaatggttttccggtgtggcttcccataataaatcgtaccgggaatgggaagggctttatcatgaaatatttaatgaacctgaaagagaaactgtgtttaaggcggcaaaagcctttacagatcagtatatttgaattcgctgggggtgcatatgttgacagtaccggaacatccttttaaccttatggcaaaagtgtatcgggaaatttttccgctcgttcatcaggaattgaacatgtggcgggaaaaatcagattccattaaaaataccgaactgcggcagcaggcggccgcaagtatccgcgataagtcgtttcattgtgaaggaggcggcattttagccctgctttcgggagagcagaaacagaaatgcgtgcaatttatcatcgcgtatcagacaatcagtgattatctggacaatctgtgcgaccgcagcacctcgcttgatccggaggacttccgcatgcttcatctttccatgcgtgacgcgctgacggtcggtgccgaggtgcggccgtactatcagtacagagaggagcgggatgacggcggttatcttcatgaactggtcagaacatgccagcgggtgctcgggtcaatagaacattacggtatcattaaaccttatttgcttgaactgtgtgattattattgcgatcttcaggttcataagcatgtcgttgagcatgaacgggttccgaggcttaaagcctggtttgagcagtacaggtcgcagcttccggaaatggagtggtttgaattctcggcctgcgccggatcgacgttaggcattttctgtctcgttgcttactcattccagcctgattttaacgaacataccgctgagaaaatccgcagcagttattttccgtacatacaaggcctgcatatactgcttgattatttaattgaccaggaagaagatctgcttgaaggcgatctgaatttctgtacgtattatcagtctcatgaagaaatgatgcagagactgcagcattttattgaaaaagcggatgaacatttgcaaggcattccgcatgaaaattttcaccggctgatcaacagggggctgctcggcgtctatttatccgatgacaaagtcgccggccaaaaagaaatgggccgcctcgcgcgaaagctgatcagggcaagcggaaaaacgtcatttttcttttatatcaacggaagagcctaccgcaaatttcagaagatggcttggacgaaaagttcgtaatgggtgaactgcgcctctcgtgtacatcatgacggcgcagttttttatttatgatgtgaagaatgaaacattgtgtgcgcctgcagaatatgatactttaattttatgaaaaaattaaagtatttagcggtcatagcattactttccatttccggaggctgctccgtcacccatgcttccgccggctatcatcctgtcttgatagcgcacaggggctcttctgcgattgagccggaacataccgctttgtcttatgcacgtgcgattaaagacaaagcagattatattgagatagacttacgggagacgaaggacggccgtctgattgcaattcacgataaaacggtagaccggacaacagatggtaaagggatgacagatgatctgtctttggctcagattaagaaactgaatgcgggaaaaggagaaaagattttaacattagaagaaatcatacagaaattcggacaaactgccaattactatattgagacaagagaaagcaacggcagcctggtgatggaaaagaaactgattgacatattacaaaaacataagctgatttccggccataaagcagtcattgagtcttttagcgggaagagcttaaagaaagttcgttctatgaataaaaaagttcctcttgttcgattattaaaagataacgaggctgaggagataaatgataagcagctgcaaaccatcagaacgtatgctgatacagtcgggatcaacgccaaattggcaaatgaagcagtcgtgaagcgcattcatcacaataagatgaaagtgcacgtgttttttgataaggaagacgagcatacgctgacgcctattatgctgaaacaaaaagcagatggtgtctttacgaacaatcccgcttatacacgcagcgtgctgcaaaacagtaaataaaaagagacatgcgcattttacgctgtctctttttttaacggtttcttttttgccgcaaggtgcattgcgaatttgccgatcagcccgatgacaaaaaatgcagcaaaccaccagtaataggttttcgcgaactcaaatcctaaatgtcttgataaaatgatgacaaacatcacatagggaacacttgaaaatatgatgcgaagaatattcaaattgccgctcctcccagatgttacacttaaaagatgaacttttttccattatttcatagtaattgatttttcttgaaaagtaaatacaaaaagaatcggcccgcttatgacaggccgattctttatttgccggcagatttcttttcaatcgctataataaacggcgggtcgttttgctggttgagaaagccgtagctcagcacgcgggctttttcctgatcaagattgctgcagtattccagtaatgcacttttttccgtcttgccttcaggatgcccgtggtacacaacgagaacgatcagcccgttctccttcagcagttcaaggagctgttcgatcgcggaaatggttgagtgaccgtttgtcgtaatgcttttatcgccgcctggcagatagccgagattaaagacggcgcaagccacacgaccgtgcgcatcttcaggcagcgatgcctttatttgatcatggcttttatggtgaagcgtgacgcgcgggccgaagtcggcaccgagccgctccttcgttttagcgagtgcgtccgcttgaatatcaaaggcatggacatgtcctgtctcaccgacaaggccggccagaaaatatgtatcatgtccgttgcccatcgtcgcgtcaaccgtgatatcaccttcctgtgcggcggacttcagcaattctttactgaaagggaggatgtgcatcaaggtcatagggcggtctcctccccggtctttctgaagagctttccttgatagcttccccgtgtttccagctctttttgaatggcgcccagtacttcccacttattgacgctccacatcggcccgaccattaattcgattggcccgtctcccgtaatgcggtgaacgatcatttccgggggaatgatttcgagctgatcacatacaagacttacatattcttcttgagaaaggaactccagctttcctttttcatattgcttcaccatcggtgtgccttttaataagtgaagcaggtgaattttaatgccttgcacatccaaatcagcgacggctttggccgtctccatcatcatgtccctgttttcaagcggaagcccgttaatgatatgggaacaaacgcggatgccgtgttttctcagtttattgacaccctcaacatagcagtcaaaatcatgggcgcggttgatcaggagtgcggtccgttcatgcacggtctgcagcccgagttcaacccacaaataggtccgctcattcagttctgccaaatattccacgacatcgtccggcaggcagtccggacgggtcgcgatagacatgccgacaacgccgtcaagcttgaggacggattcaaatttttcacgcagctcctctaccggggcatgcgtattcgtgaacgcctggaaatatgcgatatatttaccgtctttccacttttcgtgcatacggtttttgatatcgtgaaattgcgtgagtaagtcatcggcccggttgccggcaaaatcgccggagcccgccgcgctgcagaatgtgcagccgccgtgtgcaaccgtgccgtcccgattcgggcagtcaaaaccgccgtcaagcgcgactttaaacactttatgcccgaaatgctcccgcagatgataatttaatgtatggtaccgtttttccgtatttgaataaggaaaagggttattctcgttcaatgttcaaaaagcctccctcacatcagatgcatcctaaaattgtagcatgaatgatggggcggaacaatgaaacaattatggaacggtcaaggcgtaatatctacctggtttttctgttgttgttttaatcgttttggagaaatatcactgaacaatgcaaaaataattcctaaaataagaattacactgcctactttgaatgtattattaaaactgtcacttattttttcattatataaatttgaaatttttttctggatagcgataacttccttcttttgagtattgaaacttttttgtaccttttctttatatggatccggggttatagaaagaatttcttcctcttttttgtttaattcagcaatactttttcttcgatcgaaacctttactgtctgaatgctttaagtgagttattatctcgttttttgcatttttatcaaaaacctgattgttttccacaattgttatggcttctttttttgcagaagctgtgtgatcatttatattcattgtaagcacagatgtaagtatggcaatgcctagcgcttgtccaactgtccgcatcatattaagaatacctgaggcaatacctactttctcaggaggaataagccgtatccctgaactcattgccggtcctatcacaagccctaaagctaagccggtcaaacataacagaataactaccgttgttacagaactgtcgtatcgtatgtatccatataaatatgttgtgattgttaaaccgagcatacctagacccgaaagccaaatgcccccgagtttatcagatagctttccagaaagtacagaggtaaacatagatgatagagctaatgtagaaacaattaaccccgcttctaattcagtttttcccattaaattcgtgaggagtaaagtaataataagggtaccgcttgttaatccaaggccctgcataaagagggtgaaagaactgaaactaaacgtacgtatcttcagcatggataagggaatcatcgggtttttaattttagattcaataaagaaaaacaaacagaataataatacagagattacaaaaagagagataattaatggtgatgaccagcctaaatcagatacttttgcaaagccaaaggttaaacagaagagagctccggataaaataagaatccccatgtaatcaatttttttactcactgtttcatcataactctcagtaataaaaaatgctgctaaaaaaagagaaatcaggcctaaaggaatatttatgaagaagatagcttgccaattaaaattttcagttaataatcctccaagtacaggtcctaaagtagctgctaatcctgagaaagccccccagattccaatgatcaatccttttttattttgaggaacgatggccaaagcaataggcattgtaactggcacaatgaaagcagcagataatccctgaatcactctaattgtgataagcatttcaattgaagtgctcaaacaggcaataactgatgtcaaaataaaaagtgctaatccaaacataaaagctttttttcttccaaaatggtctgccagctttgatgcacctactaataaaactgcaaaagctaaagtataacctgtagccacccaagctacttgagaaaggttgctcgaaaagtaatccagcatcttaggtaatgcaatatttactatagtggtgtccattaccgaaatgaatgtacctaataataatgcagataacataattaattttttgaaattcaaaactacaacctccatcagatattaatctaaattaaaattcgatatatatctaaaaacatgataaatgcaatcttaagaggtgtcaatattattcataaattgttttttcatccacttatctcgaaatcatatttttataattcaacaattttgtaacttgaaataactcaataagagcttaaatggacctgtaaactagctgagatgattaaggatttctgaagagtatgacatgaggagaatacttagcatgaggtgaagcaagtctaataaatctaggactgctcatgataatgctcagtcaggtaagtgctaattagaaatgaatattctttgaaagtttccttttgattgataatattaaaaatgtaaaatgtctggcatgaagatagtacaacgttttcctttgtggaaaaagactttatggggtgtgaaaaagtgcggttaataataaatgacagtgtttcagaattctttgacaagatatcctctattctattcttaaaacacgaggaattcttcaaagattatacaaccaaattgggtttgaatttagataatgaatattttgtattattagatgatcttaaaagaataaaagagttagatagtgagtttttaaatttttattttggcagcttttgcgactacaaagatgttaggaatgcaaatattttttgtttagccacaacattttttaaaataccacaaatttacacgaaagatttttttgaaattattgattatttgtctgcagttacagaagaagagataagaaaaaatattttagagtctctaatttatttacaaggagatcttaaaaccgaaacatctacccaacagtatttaaatgatagggaaagtttatttgagctacttaataatctaaatataaagcccgaatacaagtggatcatatttaaggtaatgaaatctcctaaaacttatgtagatcaattttgcaataaattaatgttggtgaatggttatcttaacgaggcgatttataatttaattaaattcagagatgagtggatgaatcaattaaaaaacataaatatagattttccaaaaaagataatcagtacgttaaaaggtaaggaatacttatcttgtaattatattaatatatatccaacacttttaccttgcactgcaactattacgaaaagtgaagataacatttatgttggactgggttataaagttgataaaatatttgaaaatacattagagaaagcagagattaatcatatcattgattttttgaagcttttatcggataaaagtaagttcaagatattaatcttacttagtcataaaaaaatgtatgctaatgagattgctgaacagctaaatttaaccaacgcaacgatttcacatcatatgagaattttgacattgcaaggtttagttgagagtacgagaaatcaaaataaaacatactattatcttaattcttcaaaattcgattcacttttgaacggtttgttgaaaaaatttaaagctgttccagtcttagatggggatgagtaagttttatagttggtgttagtttcgggatgataattaaagctaataaaaacagatctaaaaaatttgatgaatcccgggtgttttacacaaaaaagataatttaatggtgaacaatttaaagcgaaccgaagatcttgtgggtgatgtggaaaaattatgatgtttttaataaaagaagaattaagttatcgttctaaaatgaaggatttttataaagacttcattctgtcttgattaagttttacatttaatcgtattttatgccatctctgtcttgtgaatgaattacctgatatttcttgtgagaattaatttggaataagaaatactattgatatgacattatcaataggaggactgtttaatggcaacaagacaatcagtagatgaacatctccaaagaagcgaacaggcatatgaatttgcgaatgagcaatttatgaccgcttcaaaacaagagcattataatgataatgagtacagtgaagcgcaaatgatgcttgaaaacgcggtgaatgaattaaacaagctgtcattatctgcgaatgatcagcaaagagagcagctttaccgaatgagattgcagctgcagaccttgcaaaacaacatgattttgcagcgtaattttgattactgaccgcgccgtttcaaatggttcagcaaacctgccggaatcccggcgggtttttttgtatttttttaaaaaaagaattgacaataggcctgagtgtgtttattgtattacgtgtactacttgatgtaatacacataaaacactcgaaaaatgaatcgacatataaatgttaagcatagggaaggggaactttcatgaaaaacaaaagatccgtaaaacaagatgtgcctcttattatcgccgcttcggttttggccagcagtctgtttgtcgttcttgtcgtcatcggttttcaatggcagaacatttaaagaaagagagcagctcgtaaaagaaagaagggaagtaaatgattcaaatcgatccgagaagctcaactccgatttatgagcagatcatacagcaattgaaagagctttgtttaaaagggatcatgaagccgggggataaacttccttctgtcagggaattggcaacgatcattatcgccaatccgaacacagtcagcaaagcgtacaaggagctcgaacgcgatggtgtcattgaaacgctgaggggaagaggaacgtatatatcggagaatgcaaaaacgacattggttgaagggaagatgacgatgataaaagagcaattgaaacagctcatcatcgatgcccattacgcgggagttgagctggagaagctgcaggaatggataaaggaaatcagcgctgatgtgaaaggaggaaaggatcatgattgaattgcggaatctctcaaaaacgatagacggtaaagaagtgctcaaggatatttcgctcaccatcggaaaaggggaaattttcgggctgctcgggcggaacggatcagggaaaacaacactgctccggctcattcagcagattctgcttccggatcaagggacggttttatttaatcaggtggaaataaagcgtcatccgaaagtcaaacagaacattatttatatgcctgttgaaaatcctttttatgacaagtatacatataaacagcttgttgcgattgtaagcagaatctatccgaattttgatgtgacttacgccaatgagctgatgaacaggtacggcattccggaaacgaagaaataccgtgaattatccacaggcctgaaaaaacagcttgcgctcgtccttgcctttgcttcacgcccggctcttatccttttggatgaaccgacggacggaattgacgccgtaacgcgtcatgacgtgctgcagcttatggtggatgaagtagctgaacgggaaacgagcattctgattacctcacaccgtttagaagatattgagcgaatgtgcaaccggatcgggtttttggaaggaaatcagctgacgaatgtgatggacttggatgatatgaaggaagagtacatgaaaatccaaatggcatttgaagaggacgtcgccttgaagatcagagaacaaaatataccgattctcgaccatgccggtgtgttttatacggtgctgattcaaaagaacgatgagaagaaaaagaactttctgcaagagctgcagccgaaagtatggaacgaacttcctgtgaacttagaagaagttttcatcgcgaagtttggaggggaccggagatggtagacaggggattgctgtacagggaatgggtgcagaatcgaactgttcttgtgatggtcggcatttttttagcggcggtcaatccatttgaagtgttaaatacctatctggtttatcaaggctgtctggacacccacgaagcatattgtaagttttatgtgaattctttggatagcggaatgctgaacttaaactgggcgcccgctgtgattttggcggtttgcttattcggactggaacgtacgaaaggaacgattgatgcgcttttcagtctgccttattcccgcgctcaggtgtttcacactaaattttggctcggagcggcggtcattaccggcgctcaggtgatcggctacgggctggctgagctgctcattcttctgttaaagcctgagcgcgtatatttcttccaccattacagcgtcggagagattattgtgagtgttttggcttttacattggtcgcgagcgcaggctgcttaacggggaatacgttcgcccagctgttaacggcgtttgccgtgtcgatagcgccttacctgattattacgttgccgctgacaaatgcggaagttatcttcagggtcggcatgcatgagctgatgccatcagtcaatgcttacctaaacgattcgtttcaatatctgattccgatcatgtatgttaatacggactgggtatctgccagcaagtatatattaatcattccggcagtgatgagcattgtattttatgccatcgggtacttttgctatgtcaggcagccggtggaacggaacggccgtttttttctttggagacagcttgaccggcccattcagattgtggtgatcatcatcgccgttctcggttttggcctggcggggtactcgacgggacatacgatgacagggtatgtggccgggatgctggtcggaggagcgatcggatttttggtcagttattttgtgatttataaaaaaacgaagcatgtgtaagagaggaggaccggaatgataccgcggggattgttgtacacagaatggaaaaaaaatcagtggttgtttttatgcagcggcattcttttaatggcggcaaacccttttatggtttataacaactactcaacatatcaagaatgtttgaataacccagctcttcaagattgtgaattcgttgtcaattatacgaatgggtcgcctctttccttcagctgggttgtgagtgtcatcattgctgtcttcttattaggcttggaacggacaaagggaacgatggatgctttgttaagcatgccttacagcagaggccaaatctttcagacgaaattctggctcggcggggcagtcattgttgctcctcaggcgataggctatggagcggcgtcattgctgatatctttgttgaaaccgagccatacgtacgattttgatcatttttcaatcggaatgattgtcatcagctttatggcttacgccttgttaatggcatccggagcaataacgggacatatattcgcccagctgttaacggcgtttacagtaacggttctgccctttttactcatcggtctgccggccgcgaatttggaggtcgttttcgattttagtgtcggagatcaattttcttttatcagcagttatatcgaatcccgtctttttatatttataacccctattggatatgtgtttaacgactggatcagagaaagagatttgattttaatcattccgattgtgatgagccttgtcttttatctgatcggttacgtcagctttctgaaacatccgaatgaacggaacggcagattctttctttggagaaaattggaccggccggtgcagatcttggtgattgcgtttgccgttatgggtttcggcgttttcggatatggggtcacagacacgatgttcggctatttagccggcattatcttcggcgcggttatcgggtttttcatcagttattttacggtttacagacagtcaaagcatatgtagatccgtttgaaaatgagcagtttggaggaaggcaaggtgccgattagcggtttgctttataaagaatgtaagcagcggcagacgctgctgctgcttacagcggggttcttatctatcttaggccctttggcaattataaatgagtattttcactataaggattgtttacgtgcacttcagctgtacccggggtcagtttgtacattcagcatcgattacagcaattatcggaatttgattgggcttcatttcattccgccggttgttatggggctttttctgataagagcaggccgggctgaaaggatgtttacactgagtcttccgtattcgagaagccggatatttcatacgaagtttttcttgggagcagccgtgttagccggctcgcagtttgtttcttacggagtatccgacatattgttcctagcgcttaaacctgacgctgtccatcattttcaatcattcagcgcagggatgctggtcatcagcttgatgatttacgcattagtgacagctgccggcacgataacgggcaatttagcggcgcagctgatcacagcgttcacggtttccgtctttccgatcgtggttatgacgatttatctgttaaacgccgagttcctttttggcaggcaggctgtgccggatattgatttcccttggagcggatttctgatctatttcatgcctgccgcttacatccatacatcatggatgtattacatgaaacacgcattgttcatctccgcattaatgggattttgtttctatctattcggctatgtgaatttcctgaaaatgccgaatgaacgaagcggacattttatcctgagcaaacacattgaacgcatcattcaagtgctcgtcatgtcgctcagtatgctgggaagtgcgggggtatgcggatatgcttataacggttcgtataccggttacatattcggcatgctcatcggtgcgattatcgggtttttcatcagttattacttcatctataaaaaaacgaaacagatataagggggagtggtgtacgtgatagaggtacagcatatcgatcattcatttaaaatcggcaggaaaggcagagagagtgaggttccggtactgaaggatgtctctttgaccgttgaaaaaggggaaattgcctgtatcgtcgggcggagcggttccggaaaatcaacgcttctgaatttaatttcgggatacatagcgccgacaaagggccgtatcgtcattaacggcactgatgtgacgggtttcaatgaaaaagagtgggcgcagttccgcctcgggcatttcggctttatttttcaaagctttcagctcatcccgagtctgacaacctatgaaaatgttgaaatgccgcttgccttaaaaggtgtcaaaccgtctgaacgcaagcagaaagtcgcggatatgctgaaacgggtcggacttgaaaatcatgcgaatcattatccgaatgagctgtcaggcggccagcagcagcgtgtcagtatcgcaagagccctcattttaaatccgtcaattattttagccgatgagccgacgggaagcctcgattcagaaacggaacttgaggtgcttgcattaattcagcagctgaaccgggagcgcgggattacatttgtcatcattacgcatgacgatgaagtcgcttcgatcgcgcattcaaaattccagctgcatgacggtgtattaaaagggggcgttactgttgagatttaaggatcagattcactttatcagaagaaatatgaagaaaaaccggctgcgtgttttcatgacggtgctggcgacgacaatggcgtgcgcgtttttagtggtgctggcttccgtcggattcggcatccaaaaaacgattacagacattacgatgagccagcagattgttacggaaatcaatgtgctcggccaagagaacggaaaagccgtgaagaaatcagacttggaaaagtataaaaatgtcaagtctgtcgttgagagaacacaagtgtatgaaccgaacaaagcgtcattgggaaaccgaacaaatgaagattcagccattgtgctgacaaacatgaaagatgaagtcaaagccaatatggagcttgatcagggaagagtcgcccgtacagagaatgaaatcgtggtcggctatgattttgcgaagaacctattgacgaaaaaagaggctgacgcttacgacaaagagttaaaggatcaccaaggcgacatgtcggaggtgaaaaaaccaaaaggctatacgaaagacctgcttaataaaacgatacagctgagcatctccaaaacaaacaaagacggagacgttgaaaaaacgaaaacgtacgacttcaaagtagtcggaattacaaaaaaaccgtcccaagattggatggaggatacaaatatttttgtgagtgatcaattcaagaaagacttctcgacattcttggatctgaagaatggaaatgcggaaaaaagcatcaatgtgtatgcggacaaattcgatcatgtcgatcagcttacccatgacctcacggatgacggcttttatgtcagatctgtcacaaccgagctgaagggcgtcaacacctttttcctcgtctttaaaatcggtctgatctttgtcggctttatcgccgtcgtgatttcagccatcggtattttcaatacgatgacgatggcggtgacggaacgaacgcaggaaatcgggattatgaaagcgatcggcgcaagcccgtccatcatccgcagaatgttcctgatggaaagcgcctatatcgggatattaggttctgtcatcgggattatcatttcttacggagtgagttttgccgtcaatctggctgtgccggttattttgaaagcggtagggggaaataccggagctgaagatcttcattataccttctcctacatcccgctcagcctcgttgtgatcgcagttgtcatttgtgcgggggtcgcggtgatttccggtatgaatccggcccgcaaagcgacaaaaaccaacgttctgaccgcattaagaagagaactgtaaaggaaaaaagccggctggacatcagccggtttttcctctatctatcagaaaagggcggataccatgtttcacattttgttaatagaagatgataacactttgtttcacgagatgaaggagagattaacgggctggtcatttgcggtgcacggaataaaggatttcagccgggtcatccgggagtttactgaaattaagcctgatttggtgatcattgatgtacagctgccgaaatttgacggctttcattggtgcagaatgatacgctcccaatcaaacgtgccgattctctttttgtcctcgcgcgatcatcccgcggatatggtcatgtcgatgcagctcggggcagatgattttattcagaagccttttcactttgatgtgttaatcgcgaaaatacaggcggtgttccgccgtgtgcaccaatacggcacagaaccggcgctgatgaaaagatggtgcggggcggtcattgacacagaaaccaacacggtcagctgtaaaaacggttcggtcgaactgaccaaaaacgaaatgctgatcttaaaactgctggctgagcagaaaaataaaatcgtcagccgggaagaactcatcagaagcctatggaatgatgagcgtttcgtcagtgataatacgctgacggtgaatgtcaaccggctgcggaaaaaactcgatcaattaggcatcgggaaaatgattgaaaccaaggtggggcagggatacatcgcaaaggaagaagacggtctttatgattaaatcatttctgctcgaaagaaaaagctggatcgcgatgtttcttttgcagcaggctgtgctcctttttgcggcatatattgatgcgtctattccgtttttttcggtgctgtattttgtttacctgtcgcttcttgtgtttcttgtatttctcttgttccgctatcgtaaagagaccgcctattataaaagcttaagagagtgggacgccaatttagacatgtcttatcttaaagcgcctgacagtccgtttgagtctatcgttgaagaaagcattgaagggcagacagagcaattacgaaaaagctcacttgatcttcaggcggcgtcagagcatgaaaaggatgatctgatgtcatggattcacgaggtcaaaacaccgctgacagcgatgcatctcatgatcgagcgccttgatgaacagccgctgaaagcccctttgctgtatgaatggctgcggattcaccatctcctggaccagcagcttcatcagaaacgattgtcctttattgaaaatgatttatcattccagcgcattcagctcagaccgctcgttttcaaagaaattaaaaacctgcaatcatggtgcatacaaaaagggatcgggtttgacattcagcttgattcaccggacgttcacagtgacggaaaatggctttccttcatcatcaggcagctgttaagcaatgccgtcaaatacagtgaagcggatgacattaccgtaaaaagctatgaacaaaacggccgggtgcatgtcgatatcgaagaccgcggcatcggcatcgagcccaaagatcttccgcgcatttttgaaaaaggatttacctcgacgcgaatgaggcgagatcacgcgtcaacggggatgggcctgtatttggctcgaaaagccgcggctccgcttctcatccagatcagcgtgcgctctgagccggaaagcggcacgatttttaccttggtgtttccaaaacagaacgatgccgtcagcatgttcagcgtgtgacaaaagtgtcacatgcttttctcttttgttcgcttaatcaaacgaaaaaaacggcttctgtttttaaaataaagataaccaatgtaaaaggagaatcataacgtgatgattttagaagcaggcaatatccaaaaaagctacggaaacaagctgaataaacaagaggtgctgaaaggaattgatcttcagattcacaaaggggaattcgtcagcattatgggcccgtcaggatcagggaaaacgacccttttgaatgtgctttcctccattgataaagtgagctcgggcaccattaaactgaacgagacggagattacatccatgaaagaaaaacagcttgccgaattcagaaaacggcatctcggctttatttttcaggattataatttattggacacgctgaccgtgaaggaaaacatactcctgccgttatccattacgaaaatgtctaagaaagaggcggacctgcgatttgccgagacggcagaggagcttgggatctatgatttgagacataagtatccgagtgaaatttccggcggacaaaaacagcggacgtctgccgcaagagctgttattcacgagccgggcattatttttgctgatgagccgaccggagcgctcgattcaaaggctgccacggatttattgaataaactcagccgcctgaatcaaaaacgccgcgccaccattgtgatggtgacgcatgatccggttgccgccagctattccggacgtgtggttttcattaaagacggccgtgtgtatacgcagctgaataaaggcggtcaggacagaccggacttttttcaggatattatgaaaacgcaaagtgtattgggcggggttcaggcatgagtattcatcatttgatcttccagaacctgaaaaagaatatgaaaaactattatctttacgtttttgcgctggtgttcagcgccgccctttatttcgcgtttgtcacgatgcaatacgatccggcgcttgatgaaatgaaaagctccataaaaggagcggcggcaatccgggccgcctctgtactgcttgtggcgatcgtgtcggtatttcttttatatgccaacaccatttttattaaacggcgcggccgggaaatcggcttattccgattaatcgggatgacgaaaatgcacattttccgcatactcagcgcagaaaatttcattttgtatttcggatcgatttggatcggtattttcgccggcttttccctctcgaaattatgtatgatgatgctgtttcatacagtcggtgtgaaagcctctgtctcactgtttttttcaagcaaggcgctcgttcagacgttaattgtgttcggggcaatttacgtgctgattatgatgatgaattacttatttattaaacggcaaagcattttgtctttatttaaaaccgcgtcatcgtcagaaagcggcataagacggctttcttgggtgcagatgttgatcggcgttgtcggtattgcggccattatcgccggctatgccgtgtccgcggatttattcggaggcagttttacgagcatgaatgaactgttttcggccatggtgtttattctcggctcggtcattatcggaacctatctgttttataaaggttcggtcagctttctggcaaatctcatccggaaatcaaaaggcgggtatctgaatgtcagtgaagtgctgtctttgtcatccatcatgttccggatgaagtcaaacgccgtattgctgacgattattacgactctttcggcgctggcaatcggtttgctgtctttaagctatatctcgtactactccgcggaaaaatcggctgagcaaaatacagccgcggactttgcgtttgataaccaaaaggagactgactcttttaccgctttattgaagaaaaacggaattgaacacaaagtaaaaacaatcaagaccattcaagccggtgtcaatatgaagaacattataaacggcgacatgaaaagctttcaacaagacccgtccagcctggcgctgccgattataagcgagaaagacgcagaagggacggagctttctgacggagaagccgtgtttaccggatataatgatatgatgaaaagatttctcgacctgaaaacgtcgggttccattgatataaacggcaaaacggataaaataccgctggcgtataagggcttgaagaacgacttcctcctgtcatatacatttacaagcggagggctgccgaccgttatcgtcacgcagcaggtattcgaccggatcgagaaagatatcgacccgtccatccagggaaaatcaaatcggtttttcggcattacactcaaacgagaagaggacatccaaaaagctgatggtctgtttcaggcgcagcactattcagacggtgcgctttcacaatttgaaacggctgacacgcaaaagaaaaacatggggctgatcatgtttattgtcgggtttttaggattaacctttctgatcacctcaggctgtatcctttattttaaacaaatgggcgagtgtgaggatgagaaggctgattatacgatattgcggaagctcggcttcacaacgggagatctgctgaaaggcatccgccggaagcaggcgtatcatttcggcattccgctcgttctcgggctgttccacagctattttgccgttcagtcaggatggtttttattcggaacggaagtgtggacgccgatgatcatcgtcatggcgctgtatacgctgctgtactccatcttcggcatgctgtcggtgctgtattataaaaaggtcattcaatccgccttgtaaaacaagttgaggagcctccgcataagcggaggctttttttgtatgaatagaagaaagcgatttttaaaagaatagacatacgtcattttttcgcgcgggggagccttatgcagaagtattttcaattgaaatctgaaacaggggcctttcatcttttttccaaggaacacattttcacattgttgatcatcgggttgctgggggcgggcgtgatcgtattccggaaaaagctcaaccagagccgcatgatccgctatgtactattcattctccttgccgtgtcgcagatcagctatcatatatggctgctttgtcatcatgcctggtcgctgaaaacagctctgccgctgcagctgagcgacctttccgtctatttggcgatgctgatggtcatgacaaaaagcaaaaagctattcgccttcctctattttgccggtttgggcagcgccgtacaggcgatggcaacacctgatttaggggcgtattctttcccgcattttcggtacatcgtgtttttcgtctcccacggctgtgtttttcttacctgtctattcatggccgcttcagaaaggtacaggccgtcggcgcgcgggctgtgggtgtcggtgctgatcgtaaatctgtacggggcgtgtgtcttttttattgatcgtgtgctgaatgcaaattatctatatttaatgaaaaaaccgaagaccgcttcgcttctgaatgttttcggaccttggccgtggtatcttctatcaatggaagcggcggtgatattgagcttcttcattctgtatattccgttttggctgctgaggaaaagagcatgaagccgggctgtttttgcgaatccaatcatttgtaattttttcaacattccggcattatttttttcagattctgatgttgaaaaaagacgtccgcggcgatagaatgaatgtgctatgataacgtgatcgatacggagccgcggcttgcggtttccgttttttcatggggttttttatagagagagggggatcggtatgccgcgcgctttgaagatattaatcatcggaatgtttatcaatgtgacgggcgcatcttttttgtggccgctgaatacgatctatattcataatcatttagggaaatcgctgactgttgcggggattgttctgatgctgaattccggggccagtgtggcggggaatttatgcggcggatttttgtttgataaaatcggcggattcaaatccattatgctgggcattatgatcacattggcaagtcttctcggactcgttctgtttcaccaatggcccgtttatatttggctgctcatcattgtcggcttcggttccggtatcgtgtttccggccagttacgccatggcgggagcggtatggaaagaaggcgggcggagagcttttaatgcgatttatgtagctcagaacgcaggtgtcgccgtgggctcggcactcggcgggatggttgcggcgtactcgtttacgtacgtgtttttagccaatgctttgctgtatgtgctgtttttccttatcgtatttttcgggtttcgaaatatcaaaaccggaaatgcgagccaggtttctgttctggactacgagcctgtcagcagcagaacgaaatttacggcgcttctcatattgagcggcgggtatgttctcgggtggattgcctattcgcagtggtccacaaccgttgcgtcacatactcaaagcatcggtatgccgctttcattatacagtgtgctctggaccgtaaacggaatattaattgtcgccggacagcctctcataggagctgttctgaaaaaatggtcaggcgcgttaaaaacgcagatggtcatcggcttttgtatttttatcgtttcgttcggcgtgcttcttagcgccaagcaatttccgatgtacctcaccgcaatggtgattttaaccgtcggagaaatgcttgtctggcctgccgttcctaccattgccaatcagcttgcgcctaaggggaaagaagggttttaccaaggattcgtcaacagtgcggcgacgggcggcagaatgatcgggccgctccttggcggcgtgctggttgatcagtacggcatgagcgtgctgctgttgatcctgatggtgcttcttgttgtcagcatcgcagcgacggtgctgtacgacaaacgcctgaaaaccgttaataaacaaaacatccaagtgcgatgacgacataaaaaatcccgccgaaacagcgggatttttttgtttatacgaccggaagcacgttgacggcgtccttaacgtttaaatacgtctttaatgaagaaaagctggcatcaagctgattcattctcatggcgagggaaggcttgatcccggtgataatcagttctgtgccgattaatttaagcaggtggtgcaatttgaaaatctggtctgccgtctgttcgtttacctcggccaaacctgataagtctataattaagtaatcatctttagatgcggttaatatgtccgtcaaagttgtcacaattgaatcaaatcgttcttccgttaagtttcccactaacggcaaggcggagatgccgtttcggatcggaacaatcggtgttgacagcgtcgtgatttctgtgagggaatcctccaggagcttttcgtattctttctgctctgtaatgtctttttgaaaaccgacaaaatagagcttgtcttcaacatacagaggatcaatgttgagttcattccaaaacggggtgccgtcttttttgacatttttcagccgcaccgtgatcttttctttctggtttaagctctttcttattttcgcgacttgttgacggtcggtttctttgctttgcagaaatctgcagttcttacctaatatctcttcggaagcgtagcctgtcatatccataaatccctgatttgtatatatgatgggattgtcctcaagagaggggtctgtaatcaccacgccgatgcgtgcgtgatcaagcgcctttttgataagctccagctgctccagttttccggatacatttgagtcagccatgtaaaacccccttttggccgtaaagctgcgcgcttttttcagccgttgtttctcccctttttaaatgaatctacagtaaccgtagcataacatatgttctgattcaagcagccgaagtttgcaatttgtcattcgggcttgtcctcatatacactgaatatataaggggaaggcacatcatcgctaagtaagtgactaggtcattgtcactgggtgaaaaatgaatctaatgcatcaagcttaccgatcatgtgttcacatataatggaagaaacaagctttttactttcctgctcaatcgccggtatgtagatatcgaaaatcatcgtattcgtaagggggctggatggcctgaagtcgctttactaaataagggctttaggaaggtgatgaagatgctgcatcaggtaataattgcttgtgtaattggaggcatcatgggggttctcggtcatgtgaaaaagagaggcaggctggagaaacccagaatgacaaagcggtttatctatctcggttttttggaagatggttttatcggaatggctgcttccatcttacttgtcttatccgctgaccccgattcaggaattcaactcgtcatcttatccataatcgcaggctacggcggagaagctgttctcaggagctttgattttgtcagagaacaaaacagtgattcggccgaagcaaaaccacaccagcaaaaaaatcctccatcaaaataatatccccgctcacgacccgttccgggtacattcccattgtatacaaacctgcttgcacttatgaacagaattctataaaatacaggtaagattacggtagcgataagaacagtgaagaggagcagtaagaagcagatttcgcactcagagaattgacggccggtgcaagtcaatcaagtctgtttccgaactcgcctcagagttgcagcggcaaaaccgctgacgcataactgcgttaaaagtatcaagtgagtgcggcttaaaaccgcgctaacgagggtggtaccgcgggaaacaaaaatctctcgtcccttttagggatgagggagttttttttagttttagaataatctgaatataatcttcctcatcccgtcaatacttggactacatacgccgtattcaatcagaaggaggtttttacgttgagttttcagcacgaaaaaatagaaaagaaatggcagaattactggttggatcataaaacgttcgccgtcagtgaagagaatgacaagccgaagttttacgcgcttgacatgtttccgtatccttcaggagccggccttcatgtcggacatccggaaggctatacggcaaccgatatcctttctcgcatgagacgcatgcaagggtacaatgtgcttcatccgatgggatgggacgcgttcgggcttcctgccgagcaatacgcgcttgacacgggaaatgatccggctgagttcacaaaacaaaatatagataatttccgccgccagatccaatcactcggattttcttatgattgggatcgtgaaatcaatacgactgatccggactattacaagtggacgcagtggatcttcaccaagctgtacgaaaaagggctcgcatacgtagacgaagtgccggtcaactggtgcccggcgctcggaacggtgcttgcgaacgaagaagtcattgacggcaaaagcgagcggggcggccatccggttgaacgccgcccgatgagacaatggatgctgaaaatcaccgcttatgcggacaggcttcttgaagatttagaagaacttgactggccggaaagcattaaagacatgcaacgcaactggatcggacgctcagaaggcgcaaacgtgcatttcgcgatcgacggcactgatgacacgtttacggtgtttacgacaagaccggacacgctgttcggcgcggcttatgccgtactggctcctgagcatgagcttgtggaggccatcacgacgcctgaacaaaaagaagcggtagacgcttatgttaaagaagttcaggcgaaaagtgacctggaacggacggatcttgcgaaaacaaaaacgggcgtcttcacaggtgcatatgccgtaaaccctgcaaacggggaaaagctgccgatctggatagcggattatgtcctcgcctcttacggaacgggcgctgtaatggccgtgccggcgcatgacgaacgtgattttgaattcgccaaagtgttcagcctgcctgtcaaagaagtcgtaaaaggcggaaacacggaagaagaagcgtacacgggagacggagaacatgtcaattccggctttctgaacggactgaataaagcggaagcgattgaaaaaatgatcgcctggcttgaagaaacgaaaaacggtgagaagaaagtgacataccgtctgcgtgactggctgttcagccgccagcgctattggggcgagccgattccggtcattcattgggaagacggtacgtcaacagccgttccggcggaagagctgccgctgattctgccgaaaaccgatgagatcaaaccgagcggaacaggtgaatcaccgcttgccaacattaaagagtgggtggaagtcactgatcctgaaacgggtagaaaaggcagaagagaaacgaacacgatgccgcaatgggcgggaagctgctggtatttcctccgctttatcgacccgaaaaatccggatcagctcgcttcacctgagaaactggataaatggctgcccgttgatatttacatcggaggggcggagcatgccgtgcttcaccttctgtacgctcgtttctggcataaattcctctatgatatcggtgtcgtgccgacgaaagaaccgttccaaaagctgtataaccaagggatgattctcggggaaaacaatgaaaaaatgagtaaatcccgcggaaacgtcgtcaatccggatgaaattgtggcgtctcacggagcagatacgcttcgcctgtacgaaatgtttatggggccgcttgacgcatctatcgcctggtctgaatcaggccttgacggagcacgccgcttccttgaccgcgtatggcgtttgtttatcgaggaaaacggcgagctgacgggcaaagtgacagaaggcgcgggcgaaactcttgagcgcgtctatcatgaaacggtcatgaaagtgacagaaaacttcgaagcccttcgttttaacacgggcatttctcagctgatggtgttcattaatgaagcttacaaagcgaatgaactgccgagagaatatatcgaaggttttgtgaagctgctttctcctgttgcgccgcatttggcggaagaactgtgggaaaaactcggccacgaaggttcgattgcatacgaggcttggcctgcttatgacgaatcaaaactggtggacgatgaagtggaaatcgtcgtccagctgaacggaaaagtaaaagcgaaattaatggttccggctgatgctgataaagcagcgttagaacagctcgcacaagctgacgaaaaagtaaaagagcagcttgaaggaaaaacgatccgaaaaattattgccgtaccgggcaagcttgtcaatatcgtggcaaactgaccggacgaagcccctctcctacagagaggggcttttttatcaggcctctatcatagaaattgcaccgcgggctttggtatacttaacaccataaagatgaatgggagtgtcacacattgaaaataaatgaaatcagcacagccgcactggaagaaaaattaaaagcgggagaagagctgtatctgattgatgtcagagaagacgaagaagttgccgaaggaatgattccggaggccgttcatatccgcatgggggacatccctgagaagatggatgcgttagacaaggacaaggaatatgtatttatctgccgttccggaaaaagaagcatgaacgtttgtatgtatttacatgagcagggcttccgtacagttaatgttgaaggcggcatgctggagtgggaaggcgaaacaaagccgaagaaataacgctttgaagtgaaagaagaaaagggacgtgcgtctttttcttctttttttataaaaaaaacgggaggcgaatcaggtgaaaccgatgatccgcgcgatgaaaacaaacgatatcaaacaggtccggcaagtcgcagaacgcagctggcatcatacgtatgaagggattattcccagacacattcaggatcagtttctcgaatccgcctatcaggatgagatgatggaacgccggctcttgcattctttgttctttgtggcggaagaagaggggcgagtgctcggttttgcaaatgccaccccggttcaaaaagacggaaatgcggagctgaccgccatctatattgatccggattgccagggaagcgggataggcacggcacttcttaaagaatgcatcaggcagtccggcggggtaaaaaagctttatgtccatgcagaaaaagagaaccgcatcgccttgtccttttatcaagcgaaagggtttcaaagggtatgtgaatttgaagaagattttaaaggacacaccttacagacggtcaaactggtgctgaacatataaaaacgtccggcccgcccgggaccggatcgcgaatgatcagtgataagccggaagccggtctttgtgcgcttcaaataagtcatcgcacaaagagatgatgtcattcatggaaagctcggcgctcgtatgcggatcaagcatggccgcttgatatacggcttccttttttaatgtaacggccgcttcgatggttaaaagctgtgtgttgatgtttgttctgttgagcgccgcgagctgctccggaagttcgccggaatagcacggcataatttggtttttaacggcggcgcacggcacttcaacgaccgctttcgccggcagattcggtatcagcccggtattcagcacattgccgccgaatgtgaacggacggcccgtctccatcgcttctataattctcgaaccgtattctttcgagcgttcatgcgtcaggttttggttgttgatgatcccgtctctcatcgtttcccagtttttgatttgttccgcgcatctcctcggatattcatcaagcggaatttggagttcatctatcagctccggataccggctttttataaaatacgggtgatattcggcattatgctcagatgattccgtcacgtagcagccgaatttatccatcagctcaaaccgcaccatgtccttatgtttcgtcttttgtttttcgcgtgcccgtcttttaatttccggatataaatcaattccgtcttttttaatctccaaaagccaagccatatggttgatgccggcaatgcgttcttccgtaccttcgtgatccatgccgagtgagtcgaacagatctttggtacagacctggacgctgtggcacaggccgaccgttttgacatttgtatgtctgagcatcgctccggtcagagaggccatcggatttgtatagtttaacagccacgcatccgggcagacctcttccatgtcttttgcgatgtcaaataaaacggggatggtgcgaagggaacggaaaatgccgcctattccgacggtatcggcaatcgtctggcggagaccgtaccgcttcgggatgtcaaagtcaatgaccgtcgcgggtttatagcctccgacctgaatggcgtttatcacatagccggcgtgtgtaagcgcttgttttcggtcatcgtaggagatgatggatatactcggattgtagcggtctctcatgttttccagcatgagctgagattctttcagccgtacagcgtcaatatcataaagcgcgaattcaaatccgtttaatgcttcagtcagtaaacagtcccccagtacattttttgcgaaaatcgtgctccccgctccgataaacgtaattttcttcaacagaaattcctcccttttcttctcagcctttgaccgccccggaggacagccctgagataaaatatttttgaagtgccaaaaacaatacgaccatcggcagcatcgccataattgcggctgcggcgactaagtgaagattgttcgcgttttcgccgaagaaccccgccatggccacggtcaatgtctgcaccttttgatcttgtaaaaagaaaatcgcaaattggtaatcgttccagataaacacgcaggaaataatgcagaccgttgcggtaatcggtttcaacaaaggaaacacgattgtataaaaagtcctgatcaatcccgcgccgtccatcctggcggcttcctcaagttctttcggaatggaagagcggataaaccctgaatataagaaaacggtcagcggcatatatgcagccgtattaatgagaatggctgcggcatgcgtattgaccagccccgcatcagcgaccatcttgtataaaggaaccatggaagtcaaaggcgggataatcatgatggaaatcaaaaggccgaagacgattttgttcagctttgtatttcttctagcgagcgggtatgcggcaagcgaacccatgaaaattagcaaggcggcggaaacggctgtaataatgatcgtgttcagaaaggattgcccgagagaggcacgctcccatgcttcacgaaaattctgaaatgaaaaggcggatggcagcgaccattttgaactgtagtctccttttgcttttaatgacgtggtcagcaaaatataaaaggggacaaaatgaacgcacgagataacggcagccaacagcgtaaaaatccgcattcgggctgttttcatgacatttccgtctcctttcgcttgaaatacacgagagccgaaaagctgatgacaagaataataacggacataaacacgccttgggcggcggcatatcccgcatcctgccgtttaaaatataaatcatacataaacgtcgacatcgattgagaggaattgcccggcccgcctgcggtcagagcgaaaatgacatcaaacagcttcagcccgccgatgatattgatgaccatgttgatggtgacagccggcatcaataatggcagggtgatggtgaaaaacggctgaagacctcccgcgccatccatttttgcagcttcataataatctttcggaatgctttgcagccccgccaaatatacaatcatcgcaatgcctgcgtattgatacgtgttaatcatgacgataatccacgggtttgccgcagggcttgccaaggcgttgacaggaccgattcccagtgcgcccagtacatcattcagcgcacccccgtcatatgagaaaataaaataccaaatgtatcccataatcagcggactgataatgacgggcaggtagacgatcgttcttgtgagcgccttcatttttaagctctgattcaaaagcagcgcatataaaagtccgagcatattctgaaaaaaagtgcttccgatgccgtaaagcaaagtgtttttcacaataagccacgtgtccggatctgtaaaaagccttttatattgagtgacccccacccattgatacgtctgtgagaagccgttccagtttgtgaatgtgataaaagcgcctttgacaaacggaaaaatcatgaaaataaaaaccgtggcaagagcgggaacgtacatccaccacagtgacgcgggttttaccggcttttgatgctgaaatccttgggtttctcttgcaagatcactcattctttgtcagctccttgtgaatcagattgaagacggagccgcttatattccctgccgagtttcgccgaaacttccgcgggggttaagatatcggccgtcagctcctgcccggctgtccccatcacatcccacattccgttcggcaaataaaggcggtcaaaataaggctgcaccttaatatgctgatagcgcttatagtcatttgcgtagaaaatgtccgtttgcacattcactaatccggccggaagcgaggtcgcttcggcaattgatttcgcatgctcgggacgggccataaatgcgatgaactgtttcgcttcttcaagccgcggggaatccttgaatgccgccagcgtgtaacgttcgcctccgatccaaaccggcgcgtctcccttgtggacggccggggtcggtatgatgccgacttttaccttcggattgatttgagcgacgtcttggccgagggtgccgccctgcagcgtaaaggcgattttgttttgcgccatcagttcaatgagctgggaccgttttgccgtcacggcatctatattgagcaggctttccttttgcatctctttcagtttgtcagataaataggtgaagtgtgtccagcggaaggttccgtttaacagctgttttttgtaacggtgtgcgggatctgtgatgagaagcggtgcggcgaattgatcgtaatattgggcaaatgagcttttctcatagccggcaaaccagaagggggtgactgttccgccgcttttttctttaatctgtctcagtgccttcataaaatcatccattgtttccggcggtttgattctgtatttttccaacattgtgcggttgtaggccagtccgtcctttgcctgattcagagggaaggcgtatattctgcctttggcgtctttgagcatgctgtttaaattcggatcgagccgcttcgtccaagacatgccgctgaggtcggcggtatattctccgtagcggattttagcccagccgtgtgtgtcgaaaagatcgggcatgtcaccggctgccattctgaccctcatcatattttcgtagtcattgcctgggaaatgaacgtttacttgaatgtccggatgttctttttggaatgaatcagccaactttctgaatacggcgcgttcgctgtctgaggatattgtggaatagactgtcaatgttttctgcttttctccggcgccgctctgttctgccgagcagccgggtagtatcatgcaagtaaaagaaagaaacaaagccagtaagcgtttcatcttttcctcctttaaatatgatataaacgctgcgggacatgtcacctcctttcttgtgagccgcagctttgtctgacaatcaatgaagtggggagcgtcacggccagcgggacggttctgccgtttaaacggtcgagaagcaatttgacacccgtccggcccatctcttccgtgtatacttttaccgttgataacggcgtgctggcgtattctgcctcatcaattccgttgaagctgacaattgccgtatcgcgcgggacttgaaggccggcttcctgcaaggcttttaaagcgccgacagccatcgaatcacttgcgataaaaaaggcatcggggagacttccgcctttgatggcttcattcatcagccggaacccttcgtgcatgctgtattcgccgatcagtacatgctccggcccggctccggccatttgtaagaaagcggtcagacgcttatcctcaatcgttttattgctgtttacaccgtctatgacggtatgctcccgttcccggccgccgatataaccgagccgctggtaaccgagcgacagaagatgttcgatcgccttttgcgctgcggcataaaaatccacgctgacagaatcgtagcgggcgggatcgggggtgccgttaacaaataccgcgtgcctgaaagcggcgctgatattcgtaagcgcctcgtcttgcaggctgccgattacgatcacgccgtccagatcgtgaaacatatgctcttgaaaagacccgagatggatagaagatgtgataaaaactttttgccgaaagcattcttcctcaatgccttttcggatcgctgaaaaataaggatcctgccgttcttcttccggtgacaggcagctgacaacgccgatcaggggggctgaatcgctgcggctgcggttcttccgtttttttgccgacggctgatagcccagctcatcggcgatcctcagaactttttctcttgtttcatcagtcacggccaaagagtcatccttattcaaaattctcgatactgtcgcgctggatacagatgcctgtaaggcaatatctttgagacggaccatttcgtatctcctttttactaaatatttactaaacagaaatgacctggttattgttaaaatgatattatcatatattagtaagcgttttcaataactatttttggttacttttagtaaaaatcagtaaaaaagaaaatctgtttttctctatcatatttcaattgaaccggaataaattgatagagaaaggagagggtgatgtgctgaagatagctgtttttgatgaggagcatgaaaaggatctgcagactgaagtcaatacatttttaaaggggatttctgatgaacagctcgttgatattaaatatacggtagcggcggcctgtgatcctgaaggtgagcagctttattgtttttccgctctcattttataccgaaaataaaaaagcccggatgaaataccgggcttttttatgcattatgcttttttgacgcggggacttctcggtttttggtatttctccgcttgtttgattccttttctttcgctcgctaatgacttgtacagagacacgatcatcagaaggatcacgactgaaaacggaaccgcggcgagaatggccgtgttttgcagtgcggccagaccgccggaatataataatacagctgccacggcggactggatgacgccccagatgattttcacccggtttgacgggtccaaagagccgtaagacgtttgcattccaagcacaaatgtcgctgaatccgctgatgtaataaagaatacagcaatcagaataagcgttaatacggatgtcaccattgtcagcggatagtggctgagtgcgccgaacagcatcgtatccgttgacattcccgcgacattgaatacgcctttctgctgaagatccatcgcggatacaccgaaaatcgcaaaccataagaaagccaatatacaaggtgtcaccaacaccccgattaaaaattcccggatcgtccggccccttgatacacgggcgataaaaatgccgacaaacggcgaccaggatatccaccaggcccaatagaaaatggtccagctgttaatccattcgcgtttttggggatcattcggagacaagcgaaagctcatctgcacgatattttggatgtattggccgatagaatcggtaaatgagttcataatcagcactgtcgggcctgcaatgagcataaagatcattaaaatacccgcgagcgccatgttggtattgcttaagtatttaatccctttgccgattccgctccacgcagaaatcaaaaataacacggtcacgacagcgatcaggatcagctgaatggaaaatgttttcggaatgccgaataaataatgcagaccgccgttgatctgagtcgctccgagccctaagcttgtcgccacaccgacaacggtcgcaaacaccgcgatacagtcaattgctttgccgatcgggccgtttactttatcgcccaaaagcggtgtcagagtgctgctgatcaaaccgggcgcgtcttttctgaattgaaaataagcgatacataaagcgacgaccgcatagatggcccaagcgtgcagtccccagtggaaaaacgtgtaccggagcgcatcacgaaatgcttggggtgtttctgtttcacctgagggagagctgatggcgtaatggctgatcggttccgcagccccgtaaaataccaaaccgattcccatgcccgcgctgaaaagcatggcaaaccatgataataagccgaattccggtttttccccgggttttccgagttttattgtgccgatcggactcacaatgagaaagagacagaaaccgacaaatatagaaacgaccagcagataataccagccgaaagaatccgtaataaatttttgtgccgtatcagtgacttgctgcaggctgtcaggagaaatggccccccataaaaccgcagctgctgtgatgacaatcacaatccaaaaaacactggagatgttcttcttcaaacgttctcaccctctgactatttttttcaatacgccattttttagtatggtcgcacgattgcagatcattcctttcttcctgttccctcaatcaggtgaaacaaaacgcagaaaactgtatcatgtttttggtcaattatcaacggggacgctcaggtaaatgcgctttaaaccatttacagcgagcgtgagaaacgtcctgcattcaaaccggcgagacgccccgtgacaaaggctgaagtgatattgtagcccccggtataaccgtgaatgtcgagtatttctccgcaaaaatataagccttccatttttttagacgccatttgtttcggctcaatctcttttacggaaacacctccgcctgtgacaaacgctttgtccaaagaaagcgttccgtcagcggcaaccgtaaattgtttgcagtctttgacaaaagccctgaattgatccttcggcagttccgtaaagcttgtctgcggatcaagaccgttccgttccagaagaaaaagcagataccgttcctgcatccacggcttcagtgcgtttttgagcgcttttttcggtgcgtctttcagttccttgtgcatcttttgaaataactcttcctcgttgatgccgggaaacagatcgatgcgtaatttgacatcgggctgctttttcagttctttgacgacaaactggctgcagcggagaatggcggggcctgacaagccgaaatgggtaaacagcatgtccatcacgtgtgtgacaataggtttgccttttttattcaggacgctgacggccgcgtttctaagggacagcccctgaagtgttttttgtttaataaacggttctgacgacgtaaccggcacttccgtcggaaagagttcggtcacggtatgaccggccgcttccgcccatgcatagccgtctccggtgctgccggtatgcgggactgattttccgccgaccgcgataatgacggcgtctgcgttaatgtgttcgtcattgtttgtcgtaatgcccgctgtcctgccgttctcgtaccgcacctctttgattttttcatttgtgcggatggtgacattcagttgttttaatcggttcaaaagcgcatcgacaacgctttgggctttgtccgtcaccgggaacatgcgcccgtggtcttcttctttcagctgaatgccgagtttttcaaaaaaggcgatgatatcttcattattaaattcggaaaacgcgctgtataaaaagcggccgttgccggggatgtgtttaatgatttcttcaacggggaggcggttggtcacgttgcagcgcccgccgccggaaatcgccagcttccgtcccagcttgtttcctttatcgattaataatacgtccgccccttcttcgcctgccgcaatcgcagccattaaaccggacgggccgccgccgatcacaattacgtcataatgtttcatatttcatcaacaactttctttttcacgtataataggcggaaatgtccgcttcctgctattatagcgaaagaaggggattccttaaacgtattttgtttttaagagctttcccaaaaagtttcccgctgtaattattaccgtctaattgcccagttgtgttaaaatagaaaagttgaatcttcgtagaaaatggtgatgaggaaacatgtcaagcaaattgttaaggggcacgttcgtgctgacgctcggcacctatatatcgcggattttagggatgatttatctgatcccgttcggagcgatggtcggagcgacgggcggagctttgtttcaatacggatataatcaatatacactgtttttaaacattgccacgatgggatttcccgccgcggtttcaaaatttgtctcgaaatataactccaaaggagactatgagacgagcaggcggatgctgagagcgggaatgtcggttatgctcgtaaccgggatgatcgctttttcaattctttatatttcggcgccgttttttgcggaaacatctctcggcggcacgagtaacaacggacttacgattgaccacgtcgtttatgtcatccggatggtcagtctggcacttttggtcgtgccgattatgagccttgtgcgcggttttttccaaggtcatcagatgatggggcccacagccgtttcacaggttgtggagcagcttgcccggatcatctttttattgggcgcaacgtatttgattttaagagtgatcaacggcggccttgtcatcgcagtcggatacgcgactttcgcggcgctgatcggatcattcggagggcttgtcgtcctttatatttactggaataagcggaagggcgatcttctggcgatgaagccgaatctcgtcccgtctgcgaacttaagttataaaaaaatgttcattgagcttttcagttatgccgctccttacgtatttgtcggactggcgattcctttgtattcatatatcgatacgaatacgtttaataaagcgatgattgcggcgggccataaggatatcagccaggacatgcttgcgattgtcaccctttatgtgccgaagcttgtgatgatcccggtttctctggcgaccgctttcggtctgacgctgattccgacgattactgaatcgtttacgagcaggaattataagcttttgaatcagcagattaaccagacgatgcaaattattctgtttttggttattcccgccgttgtcgggatgtccgtgttatcgggtccggcctatacgttcttctacggctctgaaagtcttcgcccggatatcggacaggatatattgttctggtacgcgcctgtcgcgattctgttttctctgtttaccgtaaacgccgcgatcctgcaagggattaataagcagaaatttgctgtcgtgagccttttcatcggcgtcattataaaagtggtgctgaacgtgccgctgatcaagctgtttcagggagacggggccatcttggcaacggcgctcggttatatcgcttctcttctgtacggttttatcatgattaagcgccatgcgggctattcgtatacggtacttataaaacgggtcattttaatcgcagtcctgtccgtcgtgatgggagtcgcggtcaagctgactcaatggctgctcagtttctttgtaacataccaaagcggccaggtgcatgcggcgattgtcgtctttgtctgcgccgctgtcggcggtgcggtgtacatgtttgccgcgtaccgaatcggatttttacagaaaatgtttggaaaccgtctgccccgcgttttgaggagaggcaggcattccgcccattgagaaataatgaatagtccgcttatcgcgggcttttctttttaaaggagaggatcaggatgagacttgataagctgcttgccaacagcggattcggctcaagaaaagatgtgaaaaaaatcgtcaaggccggggctgtcatgattgacggagagccggcgaaagatgtgaaaacccatgtcgatccggaaaaacaggacatcacggtatacggagagccggcagactatcgtgaatttatttatgtcatgatgaataagccgcaaggagtgctgtccgctacagaagacagccgccagcaaacggtggttgatctgctgacgcctgaagaacagcgatttgaaccgtttccggcgggacgtcttgataaggatacggaaggctttttgcttctcaccaatgacgggcagctcgctcatcgcctgctttctccgaaaaagcatgtgcctaaaacatatgaggtccggttaacttcacctctggcatcggaagacatcgttcatctggaaagaggcgtcgtcattgaaggaggctataagacgaagccggcagccgttgaaatcattacagaaaacccggatgaaacggtgattcacttgaccattacagaaggcaaatatcatcaggtgaagctgatggcaaaggctgtcggaaatgaagtggcttatttgaagcggctttcgatgggggctgtttctcttgacccggatcttaaaccgggagaattccgcgagctgactgaagaggagctcgaaacgctgagaggcgctgaagtgtaatcgatatcagaaaagcccaaaacagatttgttttgggctttttatatagaggaacaaaaaacaaggcaaagacgctgctttgccttgcagcatgtcaggccgaaaagggccttatgtaattgttcgcttaagatgtaattttcactttttttcgtgttgtctcccacttgcctcggctaggactatgaacaagatcattgtatgctaacacatttaagtctcgctgaatggttctaggtgtaatgccgaattcatcaaccagttcctgtgttgtcacaaggcctttttcctggatgaacatgtaaactgatttaatccgagtcagcatacgatttgttgaaggtttcaaaaaaccactccctatcataagatcggatggacttgatataccacaactttcgactctaaaacttcgtacgaataagcaacaaaggatgacattctgttttttttctcttttaactgcctccattatacacgatatggacgacatgaatctaggaataagcgcagataattttttccaaatgggtgcagccttggtgcattactatgtccggaccgcttttaatattatggaaactgaaactttttttatacatgtccgtatgaaagcgggggagtgagaagtttgggagaattattgaatgcaaacattgtctgcgccggttatgctgacaggccgaaggtgatttccgatgtatctctgtcagtcaacgctggtgaaattgccggtttaatcggagcgaacggcgcggggaaaagtacagtgataaaggcggttctcgggctgtcccgggatattgaaggcggtattgagtggaatgattcatcttatgcttacataccggagcggccgagtttttacgatgaactgacgctttgggagcacctcgagctgaccgggtcattgcggggtatagaaggggaagagtgccgtgagcgggcagggcggctgcttgaagagttttcgctgacgtctgtaaaacatgatttgccttccggtttttcaaaagggatgcagcaaaagatgatgcttatacaggcatttttggcgaagccggatatttacatcattgatgagccttttatcggacttgatccgatctcaacgaagctgtttaccgacatgctgattgctgagaaagaaaggggcgcgggaattttgatgtgcacgcatgttctggatacggcggaaaaaatctgcgaccggttttatttgctggatcagggcgctctgcttcttcaaggcacgttagaggagcttcaggaaaaaacggggagccgttcactgctggattgcttttattcagcggttcggagcagtcagcgatgaccgggcgggctttgttttttcaaaggctgtttcattattggcggtatcaatggaaggtgtttcagacggtcattgattggacggtcgcgctgtacatcgttcttcccgctgccgcatttgccgtttatcaatatgctgaatggctgaacggcagggggcttcttaatggagcggcaggagtattaggatggggctggctgtatgtattcagtgccttgctgttgtgcacgggttttattcatacctttttgctggaagcggatcacgtgtttttggtgcatgcaaaacatctgatgcaaaagctgaaacggtacgcgcttttgtattcgatgttcctttcccttatcaaatggggtgcgcttgccgtattgttatttcccttatggcgccagtacggtgactgtaccttaccggcatattcaggtatgttttgctgtctgttcggcttccataccgcgatattagcggtgcaccggcacagaaaaaacagcaggcggacattcgggaatcaggcggcgggctggctgaaagtgatggttctgacggcgggtgcgttttttatgatcacctttgccgccgaatggtattggctttggccggcgggatgtatattgttcatctgttccgcttttttgacttggaaagggacggagacattatcagcctttgaggaagaagtgcttgaggagaacaggcggaagctttcactcgccgcctcagttttgatgctcagccatgatgtgcagctcccgaatggtaaaaataaagggcggagcaagccgtttttatatcccggctcaaagcacatctttacaaaacggtcggcgtatacggcgtggaaagaattgttttttaaagtgctgatccgaaacggcgggtatctccggcagctttaccttttaaccgcggcttttacggctcttattctcgttcttccgctcttagtgaagccggcagtccttattttatttgcgatcgtcagccgctatgccgcgtcacttttatttgaccggatcacggataaaccggttttaagcggtatcaagagagacagtgatgactatttccgggcgcgaaacagtgcattaaccgtcattcaaatcatctgttccgcctggtgtctcattgccgcgattctttccgttctttatatgtaaaaatccctttccgaaaaggaaagggatttttcttaatgtccgttcaaaataaaaagctgaataaaaaacagcacggcgaagatgaggactagaggatggatttcgcgccattttttcttagctgctttaacaagcggatatgaaatgaagccgagtgcgattccggttgaaatactggacgttaaaggcatcgccaaaatgacgagaaaggccgggaacgcttcgtcaagctcattccagcggatattcgacacagcacccatcatcaggctgccgacaataatcagagccggtgacgtaatcgcggacacttccgataagacgctgacaagcgggctgaaaaacatggaaacggcaaacataacggcaatcgtcagcgccgtcagacctgttcttccgccggcggccacacctgctgaagattcaacgaacgcggtcgtcgggctggtgccgaagatgcttcccaccgtcgtagccgttgaatcagccaacagcgctcttctggcattcggcagctgattgtttttgatcaatcccgcttgttcagcgacaccgatcatggtgccggtcgtgtcaaaaatcgtaacgagaagaaaagaaaacacaacggcgtacagaccgtgatgcacgacatccccgagggcaccgaacggatttgtgattaaaagcccctccggcaggcgcggaaatgaaatgaaccctttcgcaaaatggatctgtccggtcaaaaaggcaatgacggcggtcagcgccattccgatgaacagagcgccgtttacattcagcaccatcagcacgatactgatgataagtccgataagcgttaaaatgacggcgggcgaatgaagatcgccgagtgcgaccagattggatttatcagccgtgatgattccggattggcgtaagccgataaaagcgataaataagccgatgccggtcgtaattccgtattttaaattgtccggaatcgcttctataagttgttttcttaaaggcgttaacgataaaataataaagatgactcccgcgataaaaacggcgctgaaagccgtctgatacgtaatgccgctgcctgtgccgacaacgtgaaaggcgagatacgcgtttaagcccatgccgggggcaatggcgatcggaaaattcgcagcgagagccatccataaagttccgacaatggaagcgataatcgtcgcggtgaacacctggtcaaacggaattcccgcattggaaaggatcaccggattgacgacaatgatatacaccattgtgaaaaaggtggtcaatcccgcggtaatttctctttttattgtcgtttgatgcttgtcgagatgaaacataagtacctccaatgacgaacattttttcaaaacatcatctatattattcgttttatcgacattttgcaagtctttatcaagaaaggggatttgtgatgaactgggaagttgaagtcatcagaaacaaagaagatctgatccgtgacacgcagaagtttttgcagatcaacagcgtaatggacgaatcaacagccggtcccggccggccgtttggagaaggcgtcaatgccagcctggcgtcactgctggaattcggtaaaaaagaaggcttcaccgtaaagaatcttgacggctatgcgggccatattgaatggggaacgggtgacgaaatcgtcggtgttttgtgccacgtcgatgtcgttccgcccggagacggctggacgagcgatccgttttcagccgatatcagggacggccggatatatgccagaggcgccattgatgataaagggccgacaatggcggcgttttatgcgctgaaaatcgtcaaagacatgcagcttcctttatccaaacgcgtgagaatcatcatcggaacggatgaagaaagtgattggagatgcgtggatcactacttcaaacacgaaaaaatgcctgacatcggctttgctcctgacgcagattttccgatcattaacgcggaaaaaggaattatagatgcgtcactgcgcattgtaaaaaacgcttctgacaaagacgcaaaaaacgtgcttctgtcattccgttcaggactgcgcttgaacatggtgccggatgcggctgaagcggttattgaagggaacggtattgatgccgtgcacgcatatttcagcaaatggcttgagcagtcaaaaacacaaggtgaagcagtttcggaaaatggaaaactgacgcttcgggtatacgggaaatcatgccacgcgatggaaccggataatggtatcaatgccggcttaaagcttgctgaatgccttaacggaacagagctggatggagccggaaagcactttgtcaaaaccgtcagtgactattttttaaatgatacacgaggcaaaaagctgaaaattgattgcagggatgacatcagcggagagcttacattgaatgtcggcacctttacatacagaaagggtgaggatggagaactcggcatcaacatccgttatcccgtcacttcagacagcaaagtcatccgtgatgcttttacgtctgctgaagaattccggcttgaagaatttaaagacagcaaaccgcaccacgtttctgccgatcatccgctcgtaaagacgcttcaaaaggtttacgaaggacagacgggaaagaaagcggatctgatttcaatcggcggaggaacgtatgcgagatccctttcggcgggcgtcgcgttcggtccgctgttccccggccggcctgacagcgcgcatcaaaaggatgagtacattgaaatcgatgaccttctcaggtcaacggctttatatgccgaagccatttatgaacttgccaagtgataataaaaagggacgccgaaagcggcatccctttttatcattcaaatgaccataaatccgtggataaataacgttctcccgtatcggccgtcatacagatgacgatctgttcgggagggaggcgtttggcggtttcaatggcggcgaagcaggcggcgcctgaagacgggccgacgagtatgccttcttcccgggccagacgacgtgttgtcgtatacgcatcttcatcagatattttcatgatttcatcgtaaacgtcctgattcagtatgccgggaataaatccggggcttgtcccgacaagcttatgagcgccgggttttccgccagacaggacgggagatcccgcaggctcggcgacatgaacaatcatatccgggaaaagctctttcagcgtttctccggttccggtaatggtcccgcccgttcccgccgttgccacaaaagcaccgagcggtctgttgagctgctgaacggcctgatagatttcaatggcggtcgtttttcggtgggcatctggatttgcgccgttatcgaattgcatcgggataaaacttcccggaatctgttcggcgagttctttcgcttttttgatgctgccgggcattctttccgcccccggtgttaacacaacctccgcgccgtacgctttcaggaggttgatgcgttctttcgtcatcgtgtcaggcatgacgaggattgccttgtagccgcgcgccgccgcgttcatcgccaggccgatgcctgtgttgccgcttgtcggttcgatgatgacagagccgggttttaaatgcccgctgttttccgcttcaatgatcatattgtaagccgctctgtctttgacactgccgctcgggttaaacgattctaattttaaatagacctgtgctgcatgttctggctgaaggcgattgagctttacgatcggtgtgccgccgatcagctccgccgtgctgtttacgattttcaaggccggctcattcctttctgtataaaacgttcggtacataatatcctatcataatgagcggacagggttctcctctccgcttatccgttttataataacaccataaccaaagagggggagatcctcgtatgaaagcttcattgccgcattattttatcggcattccgattccggctgacattgctgaaccgatttgggaagcagccaaaaaggagccggcgttatcattcaaaaaatgggtgcacccgcatgactatcatattacgctcatttttctcggagccgcggatgaagaacggcttgcgaaattatcgtctctgctcgcagatgctgcgtcggcagcgcagccgtttaccgtacagtttcagcatctggatattttcggcgaccgcagacagccgagagtgcttcaccttgagcccgaacggaatgaactgctctttgatttgcgggaaaaaacaaaacaggctgttttgaaagccggttttcaagtggaaaaacggccgtatcaccctcatatgacgatggcgcggaagtgggcgggagaccggccgttttctgacgatgtgccgtttgaaagcggcagggtgcaaagtgccgtcagcaggttttccctgtttcagacccatcttgaccggtcgcctaaatacgaagaaatcgcacagtttcaattgacataaacaaatattcggagtggagaaatcacatggcacagatcatcaaaattcacgactgcatatccagatatgaacttgatccataccattatatgaaccagtttatccggctgaagaaagaacgctgggaggcgcttcttgaagcgtttgaccggataacggaagaaacggaaacggctgccggcggggaaaccgatcaagcgccggccaggaaaaaattttccttaaaaaagagaaaagaagaaaatacggccgatataaatgaaaagaggcaccaatggtttgatgaaccggagggagaagaggcgctgttcgggaatcttccgtctcaaaagtctgagctcgcgccttttttcaaagatcagctgtatgactttcaattaaaatgggcgagctccacgctttctcaaaagtctgagctttcgcaggcggtcaaaagggacaggatgttaaaaatgctggctcaaaaactgcccgattcctattttgtgatgtatcatccggttctgcaaattcagcaggcgtccgtcgaactgagcattatcatcatctcgccgctggagattttctgcgccgcttttatggaagcggaagaggacagtgtatatatcggatcaaaacaccgtttttgggaagaaagaggctccggcagcacgcgccaagtattgaatccgtctctcagcctgcaccggacgggctcggtcgtttcgcaaatcgtaaaagaaaagcaggccgacattcccgtgcggaagcttttgctcagcagaacgtcttatattgattacccggagccgccgtacgggctggaaatagctgataaacggactgcggcagggtggctggaaaagcagcagaaaaatacggcgccgatcaagcaccaccagctgaaggcggcgaaggctcttttgtcttacggcttgagcgattcaagccggagacaggaatggcttgattaaagcggacgtttgccggctgtctcttcatctatgaagcaggtgaaaacaaacgatgagtcaatggttttttattattaatccggtctcaggaggcgggcggggccggcgtgtctggaaatcagttcaaaaagagctgaccaggcgcggggtcagccaccgctcttttttgaccgggcatcccggacatgcggaggtgctggcaagacagatttcaatgatgcaggatcataagcttaagcggctgttcgtcatcggcggtgacgggacgatgcatgaagtcattaacggactgaaaggaacggatcagattgagctgacctttgtgcccgccggttcgtacaatgacttttccaaagggctcggtattaagaagtcggcgctcctccaagaaatcaaaagtctgcaccgcccgctcacacggaaattttttgcgggaaacatcaacttttttcatgacaaagcgcaatcactctattttattaaccacctgtctgtcggcttcgatgcctcagttttgaaggcagccgcgaattttccgttttcgcgcgttcttcggtttttgcgtctcggctttgtgatttacccgctcgcgcatttacatacggcctcggggtttcagccgttcagatttgtttgcacggcagacggccagagacgtgaattccgcaatgtctggtttgttattgcggctaatcacccttattacggaggcggcatgaaagcggcgccttcagcaaatccccgtcaaaactattttgatattgtcattgcagaaaacctgtcctttttttcgctgtatcgttttttatgggcgatgagcttcggccggcatatcaaaatggacggagtgacgatgataaaggggaaggaattcgtttttgaaacagatgggaaaattccgtttcacgctgacggcgagctgatcggaacgacgccgtttcggcttatgccgggcggtgcgccattgaaaataaaaacataataaacaaatgaaacccgtcaattgtttcacggcaacagagcggttcgcggcataaatcttcagaattcacaggtgttcttgctagttttgcttgacgaagtttgtgctgtagcgctaaaatttataggacggctattgattagcatatgagactctcaatagctgtcttttttattctcatgaaattgtttatgacaggccgctccgccaatagagaaaggctggaggcctattctaaaatattttaagaaatgatgggttgaacattgatatgaactggttgggacaattactaggtagcgattgggagatcttccccgccggaggagctacaggagatgcatattatgcgaaacataacggccaacagctttttttaaaacgtaatagctcgccctttttagccgtgttatccgccgaaggcattgttccgaagctggtttggacaaaacggatggaaaacggagacgtcattacggctcagcattggatggcgggcagggagctgaaggcaaaggatatgagcggacgcccggtggctgagctgctccgcaaaatccacacatcaaaagctttgctcgacatgctgaaaagattgggaaaagaaccgcttgatccgggcgcccttttgtcgcagctgaagcaggccgtctttgccgtgcggcaattttcgccgcttattcaggaaggccttgcttatttggaagctcatgtggatcaggtgcaattcggtgaaaaagtcgtttgccattgtgatgtgaatcataataactggcttctgtctgaagacaaccagctgtatttaatagattgggacggcgccatgatagccgatccggccatggatctcggccctttattgtatcattacgtcgaagagccagcgtgggacagctggcttgggatgtacggcatgaagctcacggaagggcttcggctgcggatggcgtggtacatgttatcggagaccatcaccttcatcgcctggcacaaatcaaaaggaaacgacaaagcgtatcatgatgccatggaagagcttcatgccctgatgaagcggattgtcaagtagtcaggagtacgaatccatctgctccacccattgggacaaatggttttggtgctcctgaatatgcgtgtcgatggaatcggccgtgatgccggactggctgtagcggtagacatcctcgagcacgttttttatatttgaatcaagcccggtgttggccatcagtgatttgatgacgcgctccagctgttcatactcggcaaccgtgccgcagcaatccaattgatggtcggccaatatgtcctttaataaccggacctgatgttcgcttgttaagcccatgattcatatacacatcctttctgtgtcatacattgtgcaaagcggtgcggttttatgcatcacatgagtgttccggaccggggagcctctttttttatgcggccggcgcctttaaaaggcgcttgcggctctttatgtttcatggtatgttgttactcgaaattatagatagaggtgtcaatcatatgagaatgcgccataaaccttgggcgaatgattttctggcagaaaacgctgacatcgccatcagtgatccggcccagtataaagggcggtggaatacggtctttggcaatgacaacccgatccatattgaagtcggtacgggaaaagggcagttcatttcaggaatggccaagcagaatccggatatcaactatatcggaattgagctgtttaaaagcgtcatcgtcactgccgtccaaaaagtaaaggacagcggggctcataatgtccgtttgttaaatatagacgcggaaacactgaatgacgtatttgaacggggagaaatcaagcgcgtttatttaaacttttctgacccgtggccgaaaaaccgtcacgaaaagcgccgtttaacatttaaaacgttcttgaaaaaatacgaagaagtgatgggcgaaacaggtgagattcatttcaaaaccgataaccgcggtttattcgaatactctctgaaaagcttttccgaatacggcctgcttctgacagaagtcagcctagatctgcacaacagcgatccgaagggcaatattatgacagaatacgaagaaaaattctccgcactcggccagccgatttaccgggccgaagttgaatggagaacaaaagacagactctgatgcgggagtctgtttttttatgccgccatttgctaccattatatcaggagggatcaagatggagacattgaatattgggaatatttcattaacatggctggacggcggtgtaacacatatggacggcggagcgatgttcggcgttgtcccgaagcctttatggtcgagaaaataccccgtaaatgacaaaaaccagattgaattaagaacagacccgattctgatcagaacaaacggcctgaatatattggttgacgcgggtatcggcagagggaaattttctgataaacaaaaaaggaattacggtgtaacacaggaatccaatttaaaacactctcttcgtgaactcgggctttcctgtgaggacattcatattgcggcgatgacccatcttcattttgaccatgcatgcggcttgacggaatacagcggagaggagcttgtctctgttttcccgaatgcccgcattatcacttctgcaacagagtggcgcgaaatgagaaaccctaatatcagatcgaaaaatacatattggagagaaaattgggaggcggtacaagatcaggtcgaaacctttgagaacgagtatcagctgacagaaggcattacgatgcaccacaccggaggccacagcgacggccacagtgtcatcgtcttagaagacggcggggagacggctgtgcattttgccgacctgatgccgacgaatgcgcataaaaatccgttatgggtgctggcctatgatgattatccgatgacctccattccgcaaaagcagaaatggcagacgttcgcggcagaaaaaggcgcctggctgattttctatcacgacgcgatttacagagcggtaaaatggggagaagacggcgaagtggctgcatctgtcaaacgggagagaaaataagcggatcgatgatttacctgtatgaatttcgggaataaaagcaaacctaagacaaattgctttgaaaggaagagacaggtgaatcaatttcaagtgacgaaagatggagaaatcaaaacaactctgcgcggattagaagtgctttctacgccttttttaaataaaggggtggcctttacacaggaggaaagaaaggaactcgggctcgagggatttctgccgccgaaagtattgacaatcgaagagcaggcgaggcgggcctacgaacaattcagttcgcagcctgatgagctgagcaaaaatgtgtacttgaccgctctccatgatcggaatgaaacattattttacaggctgttaaatgatcatttaggcgaaatgctgccgatcgtatatacgccgaccgtcggcaccgcgatccagcgttacagccacgagtacagaaaaccccgcggtctgtatttgtcaatagatgaccctgaaggaatgcgcgccgcatttcagcagttcggaaaaaatgaaaacattgacttgatcgttgcgacagatgcggagggcattctgggaatcggtgactggggcgtcggcggcatcgccatttctgtcggaaaactcgcggtgtatacggcggccgccggaattgatccgtcacgagtgcttgcggtcgttttggacgcggggacaaatcaagaaagcctcttaaatgacccgctgtatgtcggaaaccaacattcaagagtgcgcggcgagaaatatgaccgctttattgatgagtatgtctcgcttgcccgggaaacattcccgaatgcgctgcttcattgggaggatttcggcacggctaacgcccgcggcatattaaaacggtataaagataaagtctgtacgtttaacgatgacattcaaggaacaggcgcggtgtcgcttgcagctgttttagcgtgtgcgaaagcatcaaaagtgcctttaaaagagcataaagtcgtcgtcttcggcgcgggaacggccggtatcggaattgctgagcagctgcgcgaagctatggtgcataacggattaagcgaagaagaatcatacagccgcttttggtgtatcgacagaaacggattgttgacggatgatatgaaggacttgcgtgattttcaggttccgtacgcccgccctgctgatgaagtgaaagagtacggccgcagcggtgaaggcggatcaattgatctggcggagacggtgcgacaggccaagccgacgatcctgatcggcacatctaccgtttcaggcgcatttacggaagaaatcgtcaaagaaatggcctcacatgtcaaacggccggctattttgcctatgtcaaacccgacgacattatcagaagcaaaacctgaagatttaattaaatggacggaaggccgcgcgcttgtcacaacgggaagtccgttcccgcctgttgcgtataacggcgttacctaccatatcggacaggcgaacaacgcgctcgtattcccgggactcgggctcggaacgattgtgacaaaagcaaggctcattacggacaatatgttcgttgcctgcgcgaatgccatcgccggtatggtggacgtcggcaagccgggcgcgccgatgcttccgaaagtggaggatctcaggacggtatcggcaaccgtggcggtagctgtagctaaagctgcgattcaggacggtgtagcggaaacggaacccgaggatctgatccaagcggttcaggacgcgatgtggaaccccgtatataaacgaattcggccgatgtaaccgaataaagcccaaaacgctgatggttttgggctttattttttgcttgtccgaattatgaggcgacagaatcaatgacatcgacaatctggcctgtttttgcattgaccataacttcatattgctccagttcgccgaatgccgaacgtgtcacgccggttttgtatacctggatggtttctccgtttacctggtagggctccggctctgtgtaaatccatgatccgtctatcggcccgcgctgtttaaaagccgctttcacgatacggagcgctttttctgaagagatataaggtttcatcgcatactttttcactgcgatggcagcgcataatccgactcctgcacctaagagaaaatgacgtaatttcaatatgaagcacctccaattatgtcgtagtttttattatacagaagatgccagacggtgttaagtaaagcggcggttttacagcccattcaatctgagcgcttggaaaacggttgtttttctaataaaataaaagcattacatagaaatgaggggaaaatatgaatgaggaaacgaaaacgcttttccggacgctgacgcagcttcccggcgcaccgggaaatgaacatcaggtccgctcttttatgaaacgggagcttgcgaaatatgcggatgacatcgtgcaggacagactcggaagtgttttcggagtaaggcgcggcgctgaagatgcgccgaccgttatggtagccgggcatatggatgaagtcgggtttatggtgacacagattacggataacggcatgctgagatttcagacgctcggcggctggtggagccaggtgctgcttgcccagcgtgtcgaggtgcagacggataacggaccgattatcggcgtcatctcaagcatcccgccccacattttaacggatgcccagcgcgcaaagccgatggagatcaaaaatatgatgattgatatcggtgccgatgacagagaggacgcggtcaaaatggggatcagaccgggacagcaggtcgtgccggtctgcccgttcaccccgatggccaacgagaagaaaatattgtccaaagcgtgggataaccgctacggctgcgggttaagcattgaactattaaaagagctgcacggaaaagacctgccgaacaatctgtacgccggggccaccgttcaggaggaagtcggcttgagaggggcgcagacagcggccaacatgattcagcctgatctcttcttcgcgcttgatgccagcccggcaaatgatatgagcggcgataaggagctgttcggccgtctcggcgagggggtgctgctccgcattctcgacagaacgacggtcatgcaccgcgggatgagagagttcgtccttgatatggcggaaacgcacaatatcccttatcaatatttcgcttcaggcggaggaacggatgccggacgcgtccacatatcaaacagcggggttccgtctgccgtcatcggcatttgttcaagatacattcatacaaatgccgctatcatccatgtcgatgattatgccgcggcgaaagaaatgctcattaagctggtcatggcgagtgacaaacagacggtcgaaacgatcagagaaaatgtgtaaaaaaaataagcagtcaataagtccctttgaatacttattgactgctgtttttacattctgttttaagccgcatgatcgagacagttctttgttgtgaatataagtgtaaagcgtattgtaaatagaattaggtaacacatattatttttcaatattattatcaaaatggttccgatccagataaacaaccttcgaacctttattgcaatgataaacgtttttaaatcaaaaacatgctgcaagcattgagaggagcagcgatttcacaaagtcgagtcatttgcatttttatttgttctgcaagaaggtatgattatgacaaaaaagacaaatataaactttcctcttgaactgattaatactgaagtggtgagtgtaggtaagcaggaccgcataaaagcggcctgcttattctgtttcaaataaataagagagtgctttcatcgcttgattgacggtttcgaccgtgatattcgcttttccggaaagctctttcagcggatgatgaagttctttcggacggatgagaatgagcggctttccttttgcgatggcataagaagcatccatcgcggtattccactgtttatatttctcgccaaacagggcgatcacaaaatcggctttttccatcagcacctctgtacggaaattgttgatatcagaagctctggcgtcttttaaaacagaatcgggctgcacgcccataatctcttctccgatattgtctgagcgttcatggttttccatcggaccgacaaacgtaatcggcaggttcagcgcttttgctttttgtttgatttcatcccgccaatcactgtggatttcacccgctaaatacacgacaaactgcatcttttgcccctccttatgtacatattcagattttcgtacggctacaagcaaaatggtaaacgaaacttgcttgataatgcaaatgaaatatgataatgatattgcatatagttggtcttgccgtaaacagtctggtatgatccaattggacaaacatcagcatataaaaaactcataatccagatggaggaatgacaatgaaaaagattgaaagcacggaagaattgcaaaaagcggtacaagacgattgggcggtatttatgttttcagcggattggtgcccggactgccgctttgtggagccgtttctccctgagctggaagcggactttcctgaattcacttattactacgtagaccgcgatcaatttattgatacatgcgcggaatgggaaatttacggcattccgagctttgttgtgtttaacggaggaaaagaagtgaaccgcttcgtcagcaaagaccgtaaaacaaaagaagaaattgagcaatttttaaccgattcccttgctaaagcataaaggaggccacgggctttgaaaatgacgtcaaggaagctggcggatttattaaaacagcgcctgcagcacgagaaccgatccttcttttttgacagagaaaaagacaccctccgtgttgaggatcaaacgaccaaaaaaggcatcacattggagctcccgccgatcattgcgaagtgggagacgaaaaaagaagaagcgatcgacgaaatcgtctactatgtgtcagaagcgatggaggcgatggaaggaagcggacaggagatgtccggaaaggaagccggaatctatccggtcatccgctccacgtcatttcccgatcaaacgagcgacggcattccgctcgtgtatgatgaccatacggccgaaacgagaatctactacgcgcttgacctcggcaagacgtaccgcctaattgacagccgtatgctcgagaaagaaaactggacaaaagaacggatcagggagacggcgtcattcaatctccgctctcttccttcggtcgtgaaacaggatacggttgcggataattatttttattttttcagggcgaatgacggctatgacgccagccggattctcaatgattcgattcttcatgaatataagcaggccgctgaaggcgaattggcgatttccgtcccgcatcaggatgtattaatacttgctgacattcgaaatgaatcgggttatgatattttagggcaaatgtccatgagcttctttgcaagcggcacggtgccgattacggccctttcatttctgtataatgaaggcagactggaacctgtgtttatcatggcgaaaagccggccgaaaaaggattagaaaggatttttcttatgaacgctttttacaataaagaaggtgtgggagatacgcttctgatctctcttaaagatgcagcacgcgaagaaatcggctatgaaagagaaggcgatgtcgtcagaatctttaacaaagaaacaaaagaaacgacgggctttaacatttttaacgtgtcttcttacttacagattgaagacaacggccccgtcgctttgtctgagactttcgtacaggatgtgaatgaaatactgaacagaaacggcgtttcagaaacgctgacggttgacctttctccgaaatttgttgtcggtcacgttgaatcgaaagaaaaacatccgaatgcggataaactgaatatctgccaagtgaatgtcggagaggaaacccttcaaatcgtttgcggcgcgccgaacgtggacaaagggcaaaaagtcgtcgtcgctaaagtcggtgcggtaatgccgagcggacttgtgattaaagacgctgaattaagaggcgttccgtcaagcggcatgatctgctccgcgaaagaactcgctttgccggatgcgccggcggaaaaagggattcttgttcttgaagacagccgcgaggccggcgaagcatttcaattctaactcccataaataagcgcacagaatcgaatgatgtgagagaaagccgttaagcaggcctgcttaacggctttcttcagttgggagcttaatcttttctgagccgcccggcaatggtatactaaatatcgtcccagactactaaaaagggagttagagagtgattaaacatgagttggctgaataaattttttgacttatttttaggtgaaaaagaagaagagcatgaacgtgaaccgaacacgcatgcccaaatccagaaacagcaaataccggatcagccagaaggcaaattaacgcgcatggaagattctaaaatatattacgaatatccgaaagggaatttccgcttcccggtcgttccggacggctataagcgaacggagcaaaaccaaagacagcgggaaaggcacgaacgccgccagccgtcccggggttatgccgccgggaaggagcaaacggagcggaaacagcatacacataaagagcctgatacggtgaaaaagccctttaaaccgtcatccattccttcaccggtttacggctttcaatctcagcacagcatcaaaaaagcgcctatttccgaaaagcggcgtgaagagaacgtaacattgctgtcagaggagcaatttgttccgccaaaatccggtcaggaaacggaaaaagagcccgtcttcacaacatccggtataacaaaacagacgaatgaccggccagaaccgtttgcgaaacaagaaacggaagaaattccggccgttaaaaaagaggagcttcacacggaggctgagaatgcaaaagagcaagtgtttgcagcaccagaaccgcagcaggctgaagagctggagcacaccgaaagcgcggagtctgccggctttacagaagaacaagagcatgaacaaacccgcccgcagcctataagagagcctgagtctgaagcatcccgaacggctgaaaacacagaggaacaagcggcgccggagggggaacatcaggagcctgagccggaaaaagcaccgccttttgaaaccgcagaagaaccggtgtatacatacacagaacccggatacgaggaaattcagccgcagtctgaagacaagcccgaatcagctgaacccgacgcgaaacaggaagcagactctcagcctgagtacaatgaagcagagcggcattcagaccccgagcctgaacctgtaagcattgagacgaccgatgccccatcccggcctgccgaagaaaaaacggagcatcacggacagcctcagactgtgagaaaagcggagcagccgaaagagcgcaatgttccgtttaacgtcatgatgcttaaaagcgataaacacaagcagacgaagacgccagagggcggagcgagctatgtctttccgaatctgtcgcttctggacgtaccgccggcgcaaagacatgacgaccaatcgtggattgaagaacagcgcgagcttttaaacgttacactgaaaaactttaatgtgcgcgcccaagtcgttcatgtcacacaaggcccgtccgtcacacgttttgaagtgcatcctgagcccggagtgaaagtaaacaaaattacaaacttagcagatgatattaaactgagcctgtctgccaaggatattcggattgaggcgccgatccccggtaaaaacacgatcggcattgaagttccgaaccgcgtaagcaaagtcgtcgatttaaggcagatgatcagaagcgccgctttcaggacgaatccgtctccgcttacagccgcgctcggtgtcgatatttccggaaacccggtcgtcattgatttgaaaaagatgccgcacgggttgatagcgggtgcgacaggatcgggaaaaagcgtctgcatcaataccattttggtcagtctgctttataaggcggatccgagtgatgtcaaaatgcttctgattgatccgaaaatggtcgagcttgcgccttataaccaaattccgcatttggtcagccccgtcatcacggacgccaaagccgcgaccgccgcgttaaaatgggttgtggaagagatggaacggcggtatgaactgtttgcccattcgggtgtgagagatatcggacgctttaatgaattaacggccgatcataagacaggcgaaaagctcccttacctcgtagtggtcattgatgagcttgccgatttaatgatggtcgcgccgaacgatgtggaagaaagcatcgccagaatcgcgcagaaagcgagagcctgcggcattcatctgcttgtcgcgacacagcgtccgtctgtcgatgtcattaccggaatgatcaaggcgaacataccgacgaggattgcattctccgtctcaagccaggtagattccagaacgatcatcgacatggcgggagcggaaaagctgctcggaaaaggcgacatgctgtactgggaaaacggtaccggaaaaccggtgcgcctgcagggcaactttgtatccgacagagagattgaccgcgtcgtctctcatgtcagaaagcagctgccgccttcttatttgtttgaacaggaagaactgatcaggcagggaaccgcccttaaggaagaagacgaactgtttcctgaggcgtgccaattcgtcgtggagcaaaacagcgccagcacctcaagccttcaaagaaggttcagaatcggttataaccgcgccgcgaggctgattgacatgatggaagccgaaggcatgatctcagaagcgaagggcagcaaaccgcgtgaagtgctgattacggccgctgacatttctcaagaataagaatatcgttcatttttctcacaaacatggtatgatagtggatggaccatcaaaactgcatcactgtcacgcgctgaaatatcatgcggcaggtttaatcaaaaagaaagttacagatactgacgataacgtaaaaataaatggaagcgccgctgtgcgggcttttcgcccgctgcggtcgcaaaatgaaatgagcgtcatatactggggaacagatagacgtttgttggaggtacgattatgactgtttatcattttgttggaataaaagggacaggtatgagcccgcttgctcaaatcctgcatgatacggggtatcaggtgcagggatcggatatcgagaagcagattttcactcaggctgcccttgaaaaaagaaatatcccgatctatccgttcagcgccgataacatcaaacccggcttaacggtaatcgccggaaacgcattccctgattctcatccggaaattgcaaaggcgctcgatgaagggattcctgtcatcagatatcataaatttttagctgaatatatgaaaaaatacacaagtgtcgcggtaacgggcgcacacggcaagacgtccacaacgggcctcttggcacacgtgatgcagcaggcgaagccgacttcgtttcttatcggggacggaacgggcagaggaaatgaaagcagcgaatactttgtatttgaagcttgcgagtaccgccgtcatttcttaagctatcagcctgattatgcgattatgacgaatattgattttgaccaccctgattatttcgccaacattgacgatgtgtttgatgctttccaaaacatggcgcttcaagtcaacaaaggcatcattgcctgcggtgatgacgagtacctgccgaaaattcacgccaatgtgcctgtcgtttattacggcacgggagaagaaaacgattttcaagcgagaaacatcgtaaaaaatacggaaggcacgacatttgacgtctttgtccgcaatacgttttacgatacgttctacatcccggcatacggccatcataatgtcctcaattccttagcggtcattgcgctctgccactatgaagaaatagacgtgaacatgattaagctcggacttgaatcattcggcggcgtcaaacgcagattcaatgaaaaagtgatcggcagccaggtactgatcgacgactacgcccaccatccgactgaaatcaaagtcacgattgaggcggcgcgccaaaaatatcccgaacgtgaaatcatcgcggtatttcagccgcatacgtttacacggacgcaatcattcctggatgaattcgcagaaagcttaagcgcggccgaccgcgtgtatctgtgcgacattttcggctctgcccgtgagaacgtcggcaagctcacgatcacggatcttcaggaaaaaatcgataacgcagaactcattgaagaaaatgacacttccgtgttaaaagcgcatgaaggcgcagtactgatcttcatgggcgccggagacattcaaaaatatatgagggcctatgaaaacgtcatagcgtaacgaaaaagcagtggggctctcactgcttttttgcgcgtgctgcaaagggatttaccgataaacggagaaatagtatacatacagacctttcatatatgtttatcattttaagaattgggtatataccactatatcctgcattaaggaggtattagatgatcatcattctttacttaagcgtcgcactcattgccgttgcatttctcatcctcgtcatctatctgtccaaaacattaaagtccgtgcagatgactttaacaaacgtagcctcgactttagacggccttgaagggcagatgaaaggcattaccgcagagacaaccgagctgttacataagacaaaccgtctcgcggaagacattcaggaaaaatcagagaaattaaatacggttgtccatgctgtccaggaagtgggaacttccgtccagcagtttaatacatccataaagcaggcagcaggttctgttacggcctctgtaagagagaatcaggataagatcagtcaggttgtcacctggagccaggccgctatggaaatatgggacaagtggaagcaaaagaaaaaaacatcgctttaatcataagaaaaatccactaaggaggaatcataatgagcaaagatggaatcaatagtaaggattttttaatcggaacgctgatcgggggaattatcggcgcgacaacggcgttgtttctggcgcctaaatcaggtaaggagctgcgcgacgatctcggcagtcaggcttctgcgttaaaggataagacggacagaatgacggccgacgcgaaagaaaaaggctctcaatatgtcagcatcgccaaggacaaaacatctaatatcacccagctggtagctgatcagtcaggtcagattatgaataaagtgaaggatttaaaagaccgttctaagagcacactaaccgagaaagccgaagagacgagaagcgaaatgcaggacacggcccaaagcatcaaggccgaagcggaagacgccggggaaaaagccggtcaggcaaatcgctgatcttcaataaggagagataaccgacatgacaaaacagctgatatcgtctgaagaagagttcaaaaatgccgctgagaaagaaaacacgctcgtgtttttaaaacacagcacaacctgcccgatcagccaagccgcgtttcaggagtttgacgcctttgcatcggagcattcagaagtaccttcttattacctgcatgtgcaggacagccggccgctttcaaactatatcgccgaggcatacggcgtgaaacatgaaagcccgcaagtattcgttattacaaacggcgaagtgaaatggcacgcgtctcattcacaaatcacaaaaaacgcaatagagcagcacctttcataattgctggccgccggttgataccggcggtttttttttgaaaaaaactattgatcatttcagccggatcatgtaggatatcaatatatactgcttcaacgcataaaagcttaaaagcgtttttgtgataaagtcgaatgtgaaaaaatttattatttcatattcctattttcgcataactgtagtaagatgcatgttaaccattaaaataaaacatagcatagaagggatgaaaaagatgagcaacaaggaattagagagtctaagacagcaggcagacgcactaaacttagaaatccttaaattaatcaatgaacgcggagccgttgtaaaagaaatcggtaaagcaaaggaagcacagggtgtcaaccgatttgaccctgtcagagagcgtacaatgcttaaccgcattattgaaagcaatgacggcccatttgaaaactcaacgatccagcatattttcaaagaaattttcaaagccggacttgaacttcaagaagaggatcacagcaaagcgttgctcgtctcccggaagaaaaaagcagaagatacgatcgttgacattaaaggtgaaaaaatcggtgacggcgatcagagattcatcgtcggaccttgtgccgtagaaagctatgagcaggttgccgaagtcgcggccgcagcgaaaaaacaaggcattaaaatcctgcgcgggggcgcgtttaaaccccgcacaagtccgtatgatttccaaggtctcggcgtagaaggcctgcaaattcttaaacgcgtcgctgatgaatatgacctcgcggtgatcagtgaaatcgtaacgcccgcccacattgagcaagcgattgattacattgacgtcattcagatcggcgcgcggaacatgcaaaactttgaattgctgaaagccgccggttccgttaaaaagccggtattgttaaaacgcggtcttgccgcaacaatttcagagttcatcaatgcagctgaatacatcatgtcacaaggaaacgaccaaatcattctttgtgagcgcggaatcagaacgtacgaaacggcaacgagaaacacactcgacatttctgccgtgccgattttgaaacaggaaactcacttgccggtgtttgttgacgtcacacactcaacaggccgccgcgatctcctgcttccgacagcaaaagcggcgcttgcgatcggcgctgacggcgtgatggccgaagtacaccctgatccttccgttgccctttcagactctgcgcagcagatggatatccctgaattcgagaaatggctgaacgaattaaagccgatgctgaaagtaaaagcataatacaacgttccgctctttaaaggccgcctcgcgcggcttttttttcgtatcttcattttatttaattataaaatgaaagtgaacgttttcatcattgggaaaaacgtgtataatttcatgagagatatttaaatttgatgaataatgaaaaataatgtacactactgacttacgcttacaatcataaacgacagaatgcgaaatcgtacgacatttctttacataaagtgtttatgctatagataaggataagtgtatccagtaaaaggagtggtttcagtgagcaacattacgatatacgatgtggccagagaagcaaatgtcagtatggcgactgtttcccgcgtcgtgaacggcaacccgaatgtaaaaccgacgaccagaaaaaaagtattggaagccattgaccggctcggctaccgcccgaacgcggtggcaagagggcttgcaagcaaaaaaacgacaacggtcggcgtcatcatccctgatatctcaagcattttctactcggaacttgcgcgtggaattgaagatatcgcgacgatgtacaaatataatattatcttaagcaactcggatcaaaatcttgagaaagaactgcatctgttaaatacgatgctcggcaaacaagtggacggtatcgtatttatgggcggcaacattacggacgagcatgtcgaagaatttaagcgctctcctgtgccgatcgtcttggctgcatcagtggaagaacagggcgagacgccttctgtcgccattgattatgaacaggcgatttatgatgccgttaagcttttcattgataaagggcatcgcgatattgcattcgtctccggaccgatgcaagagccgatcaaccgttcgaaaaaactgcaagggtacaaacgggcgcttgaagaagcggcgattccgtttaacgagcaattcgtagcggaaggcgattacacttatgattccggtatggaggcgcttcaaagcttgatgggccttgaccggaaaccgacggcgattctttctgcgacggatgaaatggccctcggcattatccatgcggcccaagatcaaggtctttcgatacctgatgatcttgatattatcggttttgacaatacgagattgagcctgatggtccgccctcagctttcaacagtcgtgcagcctacgtacgatatcggcgccgtggcgatgagacttttgacaaaactgatgaacaaagagccggttgaagagcatatcgtcgaattgcctcaccgcatcgaattaagacaatcaaccaagtcataaaaaaacggaaaagcaagcttcactctgaggggtggaatcttgcttttttacttgagtaaggagaagatatgaaacgttttgattatctgacgcccgttggctttatgttaggctgtattattgtcgcaatcggtattctgtcagggacgggactggcgggaatcagttcatttttggatctgacttcttttttaatcgtcacaggcggccttgccgcggcggtctttatcagctttccgccgagggatttaaagaaaaccccttctgttctgaaacaggtattctcccgtcaggatgacaatgtgaaagagcttgtcagagtatttgtcagcctttcggagcaggcgcgcaggcaggggctgctgtctctggatgaccaggcgcgggagatcaaggatccgtttttaaaaaaagggcttttgcttgcgattgacggctgggacgaggaaacgatccggctggtgatggattctgagatcgccgcaatggaagaaagacacagaaaaggaagacgcgtttttgaaaaagctggtgatttcgcacccgcctggggaatgatcgggacgctcgtcggactcgttctcatgctcaaaaacttaaatgacccgcataccctcggaccgaacatggccgttgcgctattgacgacgctgtacggagcgctgcttgccaatttggtgtttatcccaatcgcggcaaagcttgaagaaaaaacggaaagtgaaattttcatcaaacaggtcatgatcgaaggggttgtcggcatccaatcgggcaaaaatccccgcaacctcgaaagtcagctcgtcgtcttcagctcaagagaagactggcgtaaaggacagcctgcgaacaagaaaaagggcgctgtccatgaagcttagaaaagagcgttttgaaagaagaaacaaaccggaacattccggcggttcaccgagatggatggtgacgttcgctgacttgatcacgctcattctcgtgttctttatcttgcttttttcgatgtcgcaaatagacgcggaaaaatttcaatctgccgtttcatcgattcatacaaacggcagcggaggtgaaccggcgtcatcagacaaagcaaacgaaaataaagaacaggatttgctgttacaaaacgtgaagacatacataaaagcgcatcatttgagttccaaattgacggcgaagcgcgatgagcgcggagtggttcttgtgctgcaggaggccgttctgtttcagacgggaaaagcggatgtgctgaaaaacgccgagccggttctgcatcagatcgcggtgcttttaaaaacaattccgaatgacatacaggtagaaggccatacggacagccgccggatttccacctatcaattcccgtcgaactgggagctgtcgtctgcaagagcggcgagtgtgatccagtattttaccgcgaatgaagacttttccgccaaacggtttatctctgccgggtatgcggatacgaaacctgtgaaggacaacaaaagtcccggacatatgaaagaaaaccgccgtgtagaaatcgtgatcaaaaaaacgacctcctcataaggtcgttttttattttgttttataccgctgctcagaccggatggcaaaaagtgctttttccacggtttgggcatttttttctgaaatttcttctttgcgtggaatcggaggatataattgttcaggatcactccaaaaagcgggcagcgtgcagggggaatgcttctgccatttatcaatccatttctgcggtatgcgctccccgggatcaatccctttcatctcaagccaaatgcggctccatgctctcgggacgactctccaaatatcgtatccgccgccgccgaccgcgatccatctgccgctgcaatattgatgggctaatgaatgagcgagccgcgggatctcctgataaatggagattgtattggacaggtgtgtcaatgggtcgtaataatgggcgtccgcaccgttttgggtaagaatcacatccggcttaaaaaaagccgcaatttcagaggcggccgttttgtaagcgtggagaaaggaatcgtcctctgtgaaagcgtccagcggaatgttaaaagaatagccgtagccttgcccgcttcctttttccagtacttgtcccgtcccgggaaataaataacgcccggtctcgtgaaaagaaacagtgcagacatcagacctgtcgtaaaacgtaaattgaacgccgtcgccgtggtgggcgtctgtatcaatgtataacacttttgccccgtagttcttctggatgtattggatggccacggcgctgtcattatagatacaaaagcctgacgccctgccgcggaagccgtggtgaaggcctcctcctaaattgcaggcatgcctggcttgtcccgtcatgacataatctgccgccgttaaggtgccgcccaccagaagcgacgcagcttcatgcatgccggcaaaaacgggggtgtcttccgttccgagaccgtagctttctccttctgcggcagggagccggcccgcacccgcaagttccaccgcctgtatataatcctccgtatgaacgagagccagctcttctttagtggccgtgcgcggtttgacgatgtctccatcgtcaaacgcgtccgccgcctgaagcagatcgtatgttaaaagcacgcgctgctgattgaacggatgatcctgatgaaattgatacgtctgataagaaggcgagtaaacaaaaacgctgtctctcatggctgatccctcaaatgtttcggccataagacattgtatccggcttcatgaacggcacggataaaagggagcggattcatcgtcttcacccggaagacgagaatgttcgacccggcggaatcatggggatagacgagcacactcaggatttgcagctgaagatcacggcacatgcagctgagatcagcaaggctttttgtcatatccgtcaccaggatttccacctgtgatcccggctgggccgcgcctgtcaggctgacgaaagtccggagcacgtcggttttcgttaaaatgcccgtcagcttatgatttaccgtaatcggcagacagccgatgccgtgctcataaaaggaagcggatatttcttccacaaagtcaagcggatgggcgcagatgacattccgcttcataatggtctccactttgtttgtcagaaacgcgccgcgttccttttgttcgaagctgccggggccggcctgtttaatgtctctgtctgtgacaataccggtgacgtgcagctcgtcgtcgatgacagggagatggcggatatgatataccttcattttacggacggctgtttcaatggagtcgtgttttgagacggtgatgacgtcccgtttcatgatttgttctgcaatcatctttttatcccctttgtatgtcagtcaatacataaaccgctgataaaaacgaagcctgtcgaactgttcaattgactcctgactgacgtgcctgccgatgcgggccatcagacaattggccggatgagagctgatttccggttcatccgttgcaaaccagacaagacccccggcattcatcatcttttccatgatctttctgtattcccacacatcttttttcattccttttaaatcccaatgccagtaatattccgtcgtcatgatgatgtagcgttccatctgttcatccatcatgctgactgtcagcaacgtttttccgacagaacagcccctgtagccgggagcgacctcgatcgccccgagctcaaggagatcttccatattgccgtcagaccaccgttcaagcggatcaggatataaatacgtcacatagccgataatcgtctgtccgtccctggcgataatgatccgaccttcaggaagcccggcgatctcgattaacgctttgtgctgttcatgaggaaggcgaaaggctgtcaggccttcatgaaactcatactgtgctaggtcctttggaggaacgggcccttctaccaatagagggccggctgctgtctgaattgatgaagaatggtacgttttatgatgtttcactgattcaccgcctgtcggttcttaataaaaacacatctctcttaagcataacaaaatataaagcgttttcaatagtgttgtaatttatattttaaaaattgagaaaactgtgaacatctactataattagtctatagataagcaaagggggatgttgcatgaatttgaaagcgttgccggcggaaaaggggaattatcatctgcgaaattatgaggaaacgtaccgcagcttcgattggaaagaggtcgaagcggagttttcctggcatcagacggggaagctgaatgcggcgtacgaagcaattgaccgtcatgccgaatcatttcgaaaaaacaaagtagcgctgtattacaaggacgcaaatcggaatgaaaaatacacatttaaagaaatgatggaggaatcgaaccgggcgggaaatgtactgagacggtatggaaacgtggaaaaaggggaccgcgtttttattttcatgccgcgttcgccggagctgtactttatcatgctcggcgcaattaaaatcggtgcgatcgccggccctttatttgaagcgtttatggaaggcgccgtcaaagaccgcctgttgaacagccaggcaaaggttgtcgtgacgacacctgaactggccgaacggattccggcggacagcctgcccgacctcgagcatattttcattgtcggcggcagcaaagaagcgggagataaaatcattcattatgataaagcggctgagggagaaagcacgagacttgatattgaatggatggacagaagagacggctacctgcttcactacacatcaggatctaccggaacgcccaaaggtgtgctccacgttcatgaagccatgattcagcaataccagaccggcaagtgggtgcttgatcttaaagaagacgatatttattggtgcactgcggacccgggctgggtgaccgggacggtgtacgggatatttgcgccgtggctgaacggagcggcgaatgtgatcgtcggcggcagattcagtccggaaaactggtacggcacgattgagaagctcggtgtcagtgtctggtacagcgctccgacggctttcagaatgcttatgggcgccggagatgaaatggcatccaaatttgaccttacttcacttcgtcacgtcctgagtgtcggagaacctttgaaccccgaggtcatcaagtggggacataaagtattcggcaagcgcatccacgacacgtggtggatgacagaaacgggcggacagctcatctgcaattatccttgcatggagatcaagccgggctcaatggggaaaccgattccgggagtggaagcggcgatcgttgacaatcagggaaatgagcttccgccgtaccgaatgggaaatctcgccattaaaaagggctggccgtcgatgatggattccatttggaacaacaaagagaaatatgattcttattttatgccgggcggctggtatgtttccggagattctgcttatatggatgaagacggttatttttggttccaaggcagagtcgatgatgtcatcatgacatccggcgagcgcgtcggcccgtttgaagtcgaaagcaaacttgttgaacatccggcgattgccgaagccggcgtcatcggaaagccggaccctgtccggggagaaattattaaagcgtttatcgcgctcagagaagggcatgagccatccgatcagctgaaggaggacattcgcctctttgtaaaacaggggcttgccgcgcatgccgcaccgcgggaaattgaattcaaagataaacttccgaaaacacggagcggaaaaatcatgagacgtgtgctgaaggcatgggagctgaacctgccggcaggcgacctgtccacaatggaagattaaagacggcgttgacatcgtatcttatttatgttaaaaatgagtaagcttcatacgaaaaggttttgattgagacaagtaggatatctgattgttccagagagctgatggccggtgaaaatcagcacataagatatgccgaatacactcatgaaccgcttttgcgaacaaagctattccaaggctttcagtagtgaaagaacggacacggtccgttatcaaaaagagtgataaaagcttttttatgtttttattagtagggtggtaccgcgattatatcgtcccttcgttttaaacgaaggggcgttttttattttcataaacaaaggagcagacaaaatgactaacttattagaggatttatcattccgcggcttaatccagcaaatgacggatgaagaaggactgaataaacagctgagcgaagaaaaaatccgtttatactcagggtttgacccgacggctgacagcctgcacatcggacaccttctgccgatattgacactgcgccgtttccagcttgcaggccaccatccgattgcgcttgtaggcggcgcgacgggactgatcggcgatccgagcggcaaaaaagcggagcgtacgttaaatactcaggatatcgttgtcgaatggtcgcaaaaaattaaaaatcagctttcccgatttttagatttcgaggcaggagaaaaccccgctgtcatagcgaacaactttgattggatcggaaagctgagcatcattgaatttctccgtgacgtcggaaagaacttcggaattaactacatgcttgcgaaagatactgtaagctcaagaattgaaaccggaatttcttacacggaattcagctacatgatcctgcaatcctacgattttctgaatctgtacagagaaaagaactgcaaactccaaatcggaggcagtgaccagtggggcaacatcacggccggtcttgaactgatcagaaaatcagaagaagaaggggcgaaagctttcggtcttaccattccgctcgtcacaaaagctgacggcacgaaattcggcaaaacggaaggcggcgccatttggcttgataaagaaaaaacatcgccgtacgaattctaccagttctggatcaatactgatgaccgcgacgtcgtcaaatacttaaaatactttactttcttgtcaaaagaggaaattgaagcttatgctgaaaaaacggagacagctcctgagaaaagagaagcgcagaaacgtctcgctgaagaggtgacggttcttgtacacggccgtgaagcgcttgagcaggccgttcatatctcccaggcgctgttcagcggcaatattaaagagctttccgctcaagacgtcaaggtaggatttaaagatgtaccttcgtttgaaaaagaccgctctcaagaactgtctttagtagacgtgctagtggaatctaaactgtcgccttcaaaacggcaggcccgcgaagacattcaaaacggagctgtttacattaacggcgagcgccagacggacatcgggcatcttctgactgcggaagaccgcattgaagatcaatttaccgtactgcgccgcggaaagaaaaaatacttcctgatcacgtactgaaaataaaaagcagtccggccgctccatgcggcaggctgcttttttatgttttgtgaatactgcacggggaaatgagtacagtacatagtataagcaaaacagggaaggggtgctgcgccgtgaatttcatgtttaccatcgccaaagaaagattgcagcgggatcattgggaacagcagcaaagcataaacgccgaagccgaggaatcagagacggaagaagaaaatccgacatcataaaggtaaagcctccattctatggaatggaggcttttgattgtcaccatatcagcctgacggcggccatcagcacgactcccgtgatgaccgtgatggataagctttttgtcagcatcgcgcaaagcaatgtcgggatgagaacgatcattgctttccaatcaaaggtcaaagcgctgtttgttttcacaatcatgttttccgttaccagagccgtcaaaatgcaaagcggaataaaggagagccattttaaagccaattcaggcatctgaatgttccggacaaatataaacggaacaatgcgcggcacaagtgtaacaatcatgcagccgagtataatccagatcatttgtgtgctgatgctcatttgtccgtcaccaccccgatcgttgccacaattacggttgagacgatgaccgcgatgtgtgacgggacgaaatacgataacaagaccataaaaatgatcatatagagaattaaggagaggctgtgcttcagcttttccgaagcggacgactgcaattgcagcacaagcagcgccgcaaacatagcgggcaaagcaaagtccaggccgagagcgtaaggatcagatatccattgtccgagaagcccgcccatcacgcaggaaataacccagcacatgtaagcggttatattgaggccgttcatccacttatcgtataacctgccgttctgagccgctttgttcaccgctactccgaaagattcgtcagtaagcagagccccgaagccgatatttttcgccagagagtatttcgtgaaatacggcgcgatggtcaggctcagcagaaggtgacgcagattgacgataaacgtcgttaaaataatggcggaaatcggactcccggaaacaaggagcgagcaaataataaattgggcggcgccggcatagacacacaaggataacaaacagatttcaagaatgcttagatgagaggcaaccccgacgatgccgaaagcaaaaccgatgctcatatagcccagcagcgtaggcacacaatcccgcaccccctgtaaaaacgtatcgttcatttcccgggaaacggcggttttttgcacttctgtattaatcattttttatactcctttcatagagattataatgataacgactaatgaaaaaatcaaagaaaatacggttcacatttatatgaaccgatttccggtgacgacatgaaataacgaatggttttgtttcatcaggccttcaactttttcagccccgacttctttcacaagctctgcgaacatcagatcgtgcctcatatattccatggccacgagaacgagagcggggtcttctgatttaatggcccaggcattcgtctgcggagaaaaattggcgattaagacttctttattatctcgggcagctatcgttaatcttccgcccatccgtttctccgccacttcaggagacatattatgatttgtcgtatttccgagcttcacttccggagggccgaacacaatcgaaaagacgggcaattgttcggcggcgcgtttattagcggcttcttgaataaagggaatctgctgttcccagacagacagccacaactcttcctcggctttttcaatcatttccttcatctcattgatgacatgatcatttgtgctgatgcggcggatgacattcatctcctgctcgctttccagcgccaataacttttcctcaaggtagccgaatgagctctcgaaatcgtgccggagccggtcgattaattcctttccggccagcggggcatatgtaaccggatcagacggcacaatatggacagcgcctttatcaactaatttccccaatacctcatagatcattgagcgggggacgcctgaccttttgctgatttcatatccggtaacaggcgagtgtttcaacaagccgatatatgctttacattcatattgagaaaatccaaacttctgtaattctttcagaacatcatccataaacatcctccgtagtggttattcatgaaactactataatgtaagcggttatatcttgtcaatgggacttgagtgctgaaagaaaggttcgcctgttttgtcgctttccaacttagtttatgatgagttacatgtatggcttttgtgaaaaacgttgccgtagacccacacgaatgccgtttgatacgataaatacaagaagtcaaaaagaggaggatcacggtggaaaacacctctaaaatcgcttttttatcggttataagcaattccctggtcgtcatgctcaaaatagtggtggggataataaccggatctgtcgcgatactttcagaagccattcattcttttttagatttgatcgccgccttcatcgcctttatctccgtcaggatttcaaaaaagccggctgatacagggcatccgtacggtcatggaaaagtcgagaatctgtcggggaccatcgagacgatgctgatttttgcggcagggatttggatgatatatgaatgcgttcaaaaactggtcaacccggctccggttcatctgcccgtattgggaatcgttgtgatgcttgcgggggctctcattaatttgatcgtttcgaagttcgtaaaaagagaagccgaaaaggttaattccgtggcaatgaaatcgaatgccctgcatttactgactgacgtgtacacatcattaggcgtagcggcaagccttttggtcgttaccttaacggagtggtacatacttgatcctattataggtatggtgctggcggtgtatatcatatatgaagcgtttaagttaatgaaagaagcattcccgccgctgattgatacccgtttgtcggaagaggaagaaaaaacaattttaaagattatcgaaacatttcaacaggaatttattgaaattcacgattttcgtacaagacgctccggcccgcaggagtatattgattttcacttggtcgtagcctctcacgtggcgattaaagacgtgcacgacctgtgtgaccgcattgaaagagctattacgaatgaattcaaacaagcacaggtaatgattcaccccgagccggagagcgagaggaagaaataaatcgatcttaagtttgcgtttgttccctgcaaaatgcctgcaaaaggcccgtttccacgggtctttttgttgtataaatgactatttctcgctcatatgagagagaagcttatacacgtgaggggtacatttcatacgttatgttgtaaagaaaaagggaggtgaacagaattgaacgctatttctgttaaagaaattgaacatggagttgccgttgcggaaagagaaggtttaggggagtatttataccaagaaccggtttccaaaaaatgttcgcgccgttcccgcagcagaaaacggacacaccgttcccgcagcagaagacggagtcatcaccggacacaccgctcccgcagcagaagacggacccatcaccggacacaccgttcccgcagcagaagacggacgcatcaccggacacaccgttcccgcagcagaagacggacgcatcgccggacacaccgttcccgcagcagacggtcacatcaaaaacgtacccgcaagcgctgttttaaatgctgaagcagactctattacaagtaatggagatctgctataatggcaagagaactgcataaaagatccggtatcatcatctgcggacactgaactgacaacatggcgctgtttgttcgtgtccgttttttatgtcaaaaaagatgccggaggataaaaaggaagggatgacgccgaatgaagctgaatgaggaattttataactctgaaggaaagacagtctcttcgcaaaacataagcagcaagcttttgcatatcacggacagcgggcatatcagcattgacttcatcagcataagcaggctgcggaaggcttcaaaaatcgcgatcttaggtgacagcgtcgcccgggggctgcgcgcggaatacggctttggtgacattctgaaagaccggacagacgctgaaataaccaatctgtctgtcagcggcgttaatatgagcaaccacggaagcgataacatttatcagcaagcgcttaaaacaaagggacatgatgtcatcattgtccagggaacagatgatgattggtgcaaccacattcccatcggcacagatgaaaaggatatcaccacattttacggaggcttctgtcaagtgattcagcagctgcgaagcggaaataaaggcgcgagcaccattgtggtgaccccaacgagacaagcaaaaatatcaaaaggaaaaatcgtccgccgtgatactgataaaaataaactgggcctgaagctggctgactatgtgaaagcccaaaaagaagcctgcacactcctctctgtaccgtatgccgacctgtttgatacagatctcatcgacccgtataatcccgctttccgcagcatgtgcatgtcagaaggtcttcatccgaacgagaaagggcatcaaatcatttttcaggaaatctgccggaattattattactattacgggtaacacagcgctgcatgattattttcggccttgcttttctaaaagctcaattattctttgagatgcgtgtttttgcgctctcaaaagcgaaatgatattaccggtaaaaccgattaaaatgatcagcagcaaaatgatcatccacataagtgaacctcccgtcgagtgttgaaaaacccactctttattttacttattatggatggggaagagaataggtctaactattggtgtttctttatcaatccataaaaaaatgcacagactgaacgggtctgtgcatttttattcgcttatttcagcaggttcaatgattcacgattaaaggcttccaaatcgtcaggcgttctgctcgttacgatgttatggctcacgatgacttcttcatctttataatgtgcgccggcattgattaagtctttgcggatgctgcggaatcccgtgatatcttttcctttaagaaggtcggtatcaatcagcagctgcgggccgtggcagatcgcgaaaacgggtttctgattttccacgaatgatttagtgaattcacccgggcggtcatctccccgcagaagatctggtgaaaagcctccgggaatcaataacgcatcgaattccttggggtctgcgtctgagatcgcttgatcgatctttactttctcaccgtgcttgcccgtcacttctttccctgcttctaaatctattgtcaccacactgtggcccgcttctttaaatgcttccgccgggcttgtatattcaatatcctcaaattgatctgtcatcagaactgcgatttttttgctcatcatcatgcctcctgtgaatttgtatatgacaagaatatcaggcggattgccgcctcacaacgtatttgcttgaagatacggcatgaaaaaagacccctctgaaaaagaggagccaaaaggtacggaggtctgctgaggcaagaaatcgaaccaattactttttgcgtctttttttatcctttttacacccgcatttccccggatcgcccggatcaatgacttcgtgaattgtttcttcctgataaacgtggcggggaacataacggatatgttctctgttaatgtgtttgatgggatggacgtaaaccacttctttgtcagtatacttgtcagtcacaatatacttagggtcacagtaatacactttcgattttttacccattcatctcacctcccgtactttattaaatgctgaaaaggaggattttgcatcggacaagtacactatggcaagtccacaattttccatccgcaatttcgtttatctggtttttcctgaatccgtctcaaattggaatggctaaccctttttgaacggggaaatctataaaaaagaattcaaaaacgattcttttttcaggtcaatcgagatgcatacatctttagggggatttcagaatgctcgatgaaaaaacgattgaaatcattaaaagcacagtgccggtcttagaagagcatggtgaagaaatcacaggccgattttatgacctgctttttcagcatcaccctgagctgctgaatatctttaatcagacgaatcaaaagaaaaaaacacagcgtacggccttgtcgaatgctgtgattgcggccgcagccaatattgaccggctggaaaacatagtccccgtcgtcaaacaaatcagccataagcaccggagtatcggtgttaagcccgagcattatccaatcgttggaaagtacttgttaatcgcgataaaggatgtgctaaaagacggggctgctcctgaggtcattcaggcatgggaaaaagcatacggcgtcattgcagacgcttttatcggaattgagaaggacatgtataaacaagcggaaacgcaaaaaggcggctggaaagacgataaggcgtttaaaattgataaaaaggtaaaagaaagcaaagagataacgtcgttttatttaaaaccggaagacggacaagttctccccgaattcaaagcgggacagtatatcagtgtaaaagtatacattccggacacgggttatacgcatatccgccagtacagtttgtcggatgtatccggtaaggattattaccggatttccgtgaaaaaagacggaattgtttcttcatatctgcatgaccaattacacgaaaaggattcaattgagatcagcgctccggccggggatttcgtattagaccctgattccaaaaagaatctggttctcatcagtgccggtgtcggaattaccccgatgatcagcatgttaaagacggttgccaaaacccagccgcagcgaaacgttctctttatccatgcggcaaggagcggagagtatcatgcgctgcggcatgaagctgaagaagccgcggaacactcatccgctgacaccgtctttatttacagcgaaccgtccgaacaagaccgttcagaaaacattcgttttcgggaaggccggattgacaaacagctgttagaagaagtgatgacagataaagatgctgatttttacctgtgcggatccccgtcgttcattaaagaaatgaaaaagctgatttctgaattcaatataacgccggaatccattcactatgaattatttaaaccgcagctgagtatggtgtgatgtaacaacatcttagacagtctgtttaacagactgtctttatatgtttaatacgaaaggttttccccataacatagaattttcaagcaggtaaatcatattcaaagtcgtattatcctaaaaagacaaagttttttatgtcccaacatacttcagtagccggatggaaaggttctcttcctgatacttcaactggaacattggctcctgctcttgtgaataaaatagcaatgctctaataataagaggtggctcaatggcagtttttgttgaaaaaacgctccaaggtctaaaagaattaattgatgaaaaaggccgcttgaacattttagggaatgaaggaacgcttttagaaacagaatgtactttctttaaaggtgcaacagatctggagattgagagttttgagaagaaaataaaagtctcacttcctgaagattataaaacctttttaaaattgcataacggagccagaatatttgatttgttgatttacggtgagaatgtaggtgggggtttgcatattcttgatttagaagagattgaaaagtatatgcaaaatggttttttagagcctcagtttattcctgtcgcacatctgttagacggatgttatttgttaattgacaaaaccaaaatttctacagatccaaactatttatggttccgcggatttattgagtatgaaccaatgaaacttaattttgagatatttttagatcggtatattttgtgtcaaggagcaaatttttgggagtggaatatctataccgctgaaaattattataggactcaccagggtgataaggattaacctttcctacagttgggttggttcatttttgcggttagacttcgatttgaacttttaaaaataggtttaatttgggagacgaaccgattaattggtgtatagatgatttataaaaagcgcagatactctgcgcttttttatttaagtattttccggatcattcgcagcccgtttttggaagaaggataacggaaagcgaggtcgaagcggttcgtttgtttgacgacgctttttttgtgcgtaaatgcgttaaagctgttaaatccgtgatagctgccgatgccgctttctccgacgccgccgaatggcaaatacggtgtcgcgacgtgcattaacgtatcattgacacagccgccgccaaatgacagattctctaaaacagttcgctcgattcctttgtttgttgtgaagacataaagagcgagcggctttgggcgtgattggactttctcgatgacttcatcgatatcgccgtatgtaaacagcggaagaatcggcccgaaaatctcctcctgcattactggagagtcatccttcacttgatctagaatcgtcggcgctattttgtggtgttcaggattaaattgtccgcctgtaagcgggacgccatcattcagaaagctgagcagccgctgatagtggcgttcactgacgattttgccgtactgcggattttgttcaggctgagggccgtaaaattcactgatcgcatgcttcatttcttctatgagcttcgttttgatatcttggtggacaactaaataatccggtgcgatgcaggtttgccctgcatttgtaaatttcccgaagacgatgcgtttggcggcaagctgtatatcagcatccttatggacaatgcagggacttttgccgccgagctccaaggtaacgggaattaattgtttggaggcggcctccataacgatttttcccacggcaacgcttcctgtgaagaaaatatagtcaaagggctgctgtaataaaacagtgctgacgtcgggcccgccctccgccatagcgacataatcactcggaaaaacgctgctgataagtttagaaagaacagcggaaaccgcaggcgtatattctgacggtttgagaacgactgtgtttccggccgcaatggctccaatcaagggtgaaagcgccagctgcaagggataattccaaggcgcaatcaccaaaacgattccatatggctcagggataatcatgcttttcgagcccaggtgagtcagaggcgttttgactcgcttcggtttgacccattttctcagccgcttcatcacaaaactgatttcttccagaacaattccgatttctgtcgtgtacgcctcctgttcggatttgtggagatcctgatagagagcggctgctatatcggcttcttgtgttttgatggcttgtttcagcttttgcaatatgttcagccttgattctagcggtctcgtatgccccgccgcaaaataggctttgtgcttgctgacgatagaggggatgctgttcattccgtctctcctttttgtaagtatgatgattcattatgtaaaaaatcgcttctgcctgtcaaatgattaaggtgagtcagaaaaaataacaaactcatttctgcgtttcggcaggaatttgatgaaaaagagaattctttttgcggcattatctgttgcaggcattatggggttttctaatgtacatgtagttgaaaagccggttggcacataaaaaaaagccccggacaggggcttttttaataaagagagggaacagcccaaaagaaaaaccccggaaacattgtcatcacaacatgtccggggtttaatccaatgctctttaaagagcgttttacttaacgggagtagaactcaacgataagcgcttcgttaatttccggagcaagctcagagcgctctggaagacgagtgaatgtaccttcaagcttttcagcgtcgaaagtaaggtactcaggaacgaagttgtttacttctacagattctttgatgatagaaaggtttcttgatttttcgcgaacaccgattgtttgaccaggttttacttggtaagacggaatgtcaacgcggcttccgtcaacaaggatgtgaccgtggttaactaattggcgagcttgacggcgagtgcgtgcaagaccgagcttgtacacaacgttatcaagacgtgcatctaaaagaatcatgaagttttcgccgtgtttaccagtcatttttgccgctttgtcaaacaatgtgcggaattgacgttcgtttacaccgtacatgtgacgaagtttttgcttttcttgcaattgcaaaccgtattctgatagttttttacgctgtcccggaccgtggggacctggtgcgtaagggcgtttttctaattctttacctgtaccgctaagagagattcctaaacggcgggacagtttccaagatggacctgtatagcgagccataatgtgactcctcctttggttttattttgtggaaaataaaaaccgtctgttcgatccgaccgtgcacattttgttttcatgtatcctcgctccagcagcagagagttacacgatacaccttacagctaaggaacaaaatgcaaacacagaagctgaacaaaaaggctgcaatatttcacacaaagaacattatatgatttttccccgccgccgtcaaccatttctccatgaagagtgccggtttatgatataatgtacaaaaatgagtagtacatgtttaggtgataaaaatgaaaaaacaaacaattgatgaagtgacggcctttcatcagaaaatgctttcttttttcttaacgaaatctgaatccgtctcattatccgactcgctgttatggctggcctcagctctagaatcctgctttacatctctttcattgaccctttcaccggcagaatcaacacgtttcaccataaaaacagaagatgaaccgcattatgctccgctgaaagagagtgacggccgttttatgatcaggaatcagacgtccggcagatccttttatctgcgctcggaaggcgggctgccgatcccggaatcattgcctgagatcgttactcagtttatcaatcaatctgtgagacaaagcgggctgtttgacaaaacgaagcatcagcggaaaattcacagaatgacagaaatgttccattcgcttttggatcaaaatgaggttttggaaaaactgcaggcaagtttgagtacggctttccggtctttccgcttttcactgtttatcacgcaggatcaggatacggacagacagcttcccgcaaaagaattacatatggatggaaaagatgccgatccgtctgccctgaaggtttatttatcggggagactgctcagaaaaggcaggtcatctgcttacctgccgatcaaaggccagcaggggacttacggggttctgaagacggaggggctgcaggatgccgttctttcgtgcagtactctcagtgaaatgctgctgcttgcgggcgcggcgggaaaagcatttgaaaatgcgcagctctatgagcaatcgaaaaaaagcattgcgaatctggagctcattaatgaaacatcgcgccagctgaatcagcgcctcagactcactgacacgatgcgggaactcgccgccattatgacccaatcatttcatgcggaagaagtggctttttttcatattgatcattttgagacgcaaaatctgcttccgggacataccgctttttttaagacagaacgtgcgaacccctatatcagcattgtgaaagaaaagctgttcgagggagaaaagggcgtgtttatcggcagcggaaagactgtattcggcgaaaacggcttcggctcgctgatggcggtgccgatgatcgaaaatgacaccgtcttcgggttcgcgattttattgaaaaaggatttgtatgcttttacgtttgaaatgtataagctttttcaagcgctcattcaccatgcgacattggcggtcacgaactccatgctgcgcgacaggcttgagcatcttgttcagacagaccagctgacggagctgtattcaagaacctatttggatgagaaaattcaatacagcatgaaaattcataaacggggtgtattcatcctcgttgatatcgataatttcaaaaccattaatgatacatacggtcatcaaacgggagattcgatcctgattcaggtggcctccgttatgaaaaaccatattcgtgagcatgatgtcgctgcaaggtgggggggcgaggagctggctgtctatctgccgaatatcaacgtgtcatccggagaacgcatcgctaaaaggctggttcgcgccatccgggaaaacaccgagccgcgcgtgacgatttcctgcggcgtttcctgctggtcaaagacaggcccgatgccgttgaaaatgctcgttcagcaagcggacgaggcgctttatatcgccaaacggaacggcaaaaaccggctgatcatccaccaaaacagcacgacgacataaaaaaggagccggcctgccggccgggctcctttttttatcctaatcgtttttcaagcgtttcaacaaactttgctaaataggcttcgtccgtttcatcaaaacggtttttcacagggctgtcaatgtccagcacaccgatcacttcaccgtttacgcggatcgggaggacgatttctgactgggaagccgcgtcacaggcgatatgtcccgggaacgcattcacatcggcaatccgctgcacggcgccgttagagtaggcagtgccgcatacgcctctgccgaacgggatgcgcacacaggcaggaagtccttgaaacggtccgagcacgagctcgccctctttagcgaagtaaaaccccgcccagttgacttcatgtaatgaatggtataaaagcgctgatgcattcgcgtaatttgcgatcgcatccgtttcatcttctgtcatggcttcgagctgtttaagcagaagctgataacttttttctttatctccggattgtttttcgacatgaaacatggaaaaccctcactttttctataatatcaaacaaagttccggccgttctgccggcatttgtcgagaagttcttacaggaacggcgcctttctgcttgaattgttacacataaaggggtgagccgtatgaaagtaagcaccaaagacaaaattattaacgccgctgtccagctgtttaaccaaaaaggttattccggcacgtccgtccgtgaaatcgcaaagtcagctgatgttaatgttgcgcacatctcctactattttaaagggaaaggcggattaatggaacatttagtttccgagttttacgaaggctatactgaagcgctggaaaaagccgccgtcagtttgaacggtgaagacgcgcaggaacgcatcctgcgggtgattttcgatattttatcctatcagcacgataaccgtcaactaacgcggtttgtgtaccgggaagtgacgattgattccgtgcttatcagggaaattatgtctacttacttaatgaaagaaaaatatattttccagctggtgattgaagaagggcagtcacgccacagacggctgacgctgcccgtgccgcattttattctgcaattgaaatccctcttgatgatgccgtatcttcagcctcaatacattacagaggtgctctatatgcagcctcatgaaccgtacttttataaaaggtattttgaagaggtgaagatctggatcgaaagcgtgttccgacggcctgatgcggcgcttatgaagtaatgatgcttttgtacgtttcataggaactgccgacatcttccgcttgatgggcgtccgacccgaatatgagcgggatttttttttgcttcgcggtctcagccatccaatcctccatgtatacttccccggcaaacttctttctgagcccggatgtattcacatccagctccattccgtgttctttcacggcgtcaagacagcgggccgcaagctctcttatttgaggtgacatgctgtaagggaaaaggcgtgcgaattttttgacgagcgtgatatggccgacccgttttggcttaaaggggccgagcggtgttacaatggaagaatacacagtttcatagtattgttcatatacggcttcaacgcttccgaagtgcgcggcgagctgctgaaaggcgtgctcgtcaaaatcgaggcagatataagacggaccggtcttcaaaaaatgaacggataaaatgccgtcatccagtgaggggccgtacgtgttcagaaacgccgcggtttcctcttcataccctgtgataaaatcagtttcgagcccggtcagaatgctgatttgtccatcgtattcctttttcagctgtgacagccgctccaaataaacctccatctgtctgagatccatcgcgctgtcctgaagcggtacgggatcttgaaatgacggaggaaggggggcgtgctctgtaaatgtgatcgagtcaaagcctctttccagggccttttcgacatattctttcagcgcatccttcgagccgtgagggcaaaaaggcgtgtggatatgagcgtctcgtttttccatttgtgtcactccattaaaaaattgcagaatcctgccgaaattatgcaaaaagtttttgatttctggtcaaaaaatgttggttacatggtatcataataacaatgaaaacgacagattttctcaatacatatattgaaatctttctgaatacataaaacaccctgacagattaagagaacaacaagggggctcattatggagttagtcatcggattattggttatactgctcgcgctctttgcggcgggctactttttcaggaaaaaaatttatacggaaattgaccggctggagtcatggaagattgaaattttaaaccgttcgatagtggaagaaatgtccaagatcaaacatctgaaaatgaccggagagacggaagagttctttgaaagatggcgcgaagagtgggatgaaattgtcacagcccatctgccgaaagtagaagagctcctttatgatgccgaagagaacgccgacaaataccggtttaaaaaagcgaatcaggtgcttgtccacatcgacgacctcctcactgcagccgaatcaaatatagaaggcatactgcgtgagatcagcgatcttgtgacgagcgaggaaaaaagccgcggagagattgaacaggtgcgtgagcggtattcaaaagcgcgaaaaaaccttctggcgtatagccatctctacggagagctatataacagcctggagacggatctcgacgaaatctggagcggcataaaaaagttcgaagaagagacggaaagcggcaattacatcaaagcgagaaaagtgctgcttgaacaggaccgcagactggatcagcttcaaacatacatagatgacgttccgaaactgctcgctgactgtaaacagaccgtgcctaaccaaattgccaagctgaaagacggctaccgggaaatgacggaaaaaggctacaaattggagcatattcaaatcgaaaaagagctggagacactcaccaatcaattgaaacgggccgaaagcgcgcttttggaagaattagatgtcgacgaagcgtccgccattcttcagctgattgatgaaaccattcaatcgatgtatgaacagctggaaggcgaagtggaagccggacagtccgtattaagcaaaatgcctgagctgatcatcgcgtatgagaagcttgaggaagaaaaagaccgcacaaaaaccgaaacggagctcgtcaaggaaagctatcagctgacggcgggagaaatcggcagacagcatgctttcgaaaaacagctggaaacgatcggccggctccttgagcaggcgagagaaaagcttgacggtgagcatgtcgcttactcgctgctgattgaagaagtcgaggccatcgaaaagcagatggaagaagctcagaaagaacatgccgaataccgtgaaaatctgcaggcgctcagaaaagaagaactgcaggcgcgggaaacgctgatgaatcttcggaaaaccatttctgacacggcccgaatgctgcaaaaaagcaacgtgccgggaattcctgaacaagtcaaggacaagctcgagacggcaaatcatcatatagaagagaccgtcagccaattggaagagctgccgttaaacatggaggaagccgccaaacatctgaccgaagctgaaaaggtggttgcggaagtcagcgaagaggcggaagaacttgtgattcaggtgaagctgattgagcggatcattcagtacggcaaccgtttccgaagccagaatcatattttatccgaacagctgaaagaagcggaacggctgttttacgcttacagctataatgaagcttatgagatggcggcagatgctgttgaaaaagcagctcccggcgccgtgaaaaaaattaaagctgatcaatctgcttcatagacgcacaagcaaaaactgcaccctgatggaaatcagaggtgcagtttttttgtttctcacggaatataaaaagcgcctatggctgatatacatcaaaccgcaggcgctgaatgttacgattttgctttatttaattcgatgggcgggctgataaaaaacgtgatgatgcagccgatgatcgctccggcaatgcccggaagcacccagccgattcccatgctgtaaagcggaagatttgcgtttaagaatgaatctaatgatccgagcggaatgccggctgccttcaaaccgtccaggatactgaacagccccgttccgatcaggcaggcgatatagacttcgcgtctttccttaaagattttatcaataaaggaaagtacgataatgacaatcgccagcgggtaaatggctgataaaataggaactgaaaatgcaataatctcagcaagtccgaaatttgaaatcgccagactgaacagcgtgacaatcgtaaccaccattttgtatgataaagcgggaatcaattttgaaaaatattcgccgcaagatgtgacaagcccgatgcttgtcgttaaacacgcaacggtgatggcggcaccgagaacaatgtttcccagtgaaccgaacaggtaatcagatgaagctgataaaatctttgcgccttcgccgagcggcccgacagcgtccgtgcttgtcgctcccaaataggccaaagataaataaatgaatgtcaaacccgccgctgcaatcagacccgctttaatacaagcggcggcgagcgctttacgctgggtgacgcccctgcttttaacagcgttgacgacaacgacgccgaagacgattgaggcgagcgcatccattgttttatagccttccaaaaatcctttgaacaccggcgttccggaatatgcctgatgtacggcgcccagcccgcccatcggagtgacgatggcttttacgacaatgattaaaataataccgaatttaatgggagtcaaaatctttccgactctgtccacgattttggacgggttaagagctaaataatacgtaatagaaaaaaagatcaacgtgaaaacaaataaagataatctttccggaatgccgcttaaaaacggaactgcaccgatttcatatgaaacggttccggttctcggaatcgcgaaaagcggcccgattgataaataaagcacaacggtgaaaatagtgccgaataccgggtgagccttatcggcaagtcctttcgcgtctttgcccgttaatgcgatggcgataatacctaaaagcggcagtcctacgccggtcagtaagaaaccgcccatcgctttccagacattatgccccgccgcttgcccaagctccggcggatatatcatatttcctgccccgaaaaaaagtgcgaagagcatgaaaccgataataacggtatctttgacaggtagtgagtgtttcataaaagtcctcctaaatactatgttgaaatattctgtcaattaattgtcagataatataacaaaacgaacattacttattatatggcaatgtacagagaagtcaatactcgatttattgcgaatttctatttacttttgttatggtagcataaatatcatacgatgtaccgttttcataaaaggagtaaaaaaaatgatatatttagacaacagctcaacgaccgagccgtatgaagaggttttggaagtgtataaacagacgagcagccgttatttcggcaatccttcgtctctgcaccagttaggaactgagacggagcagctccttgaagcggccgctcagcaaataaaaagaaccttacgtttaaaaaattatgatattgtatttacatcaggcgcgactgaagcgaataacgctgcgttaaagggagcggcctgggcaaacatgagtaaaggaagacatatcattgcttcggcgattgagcatccttctgtgacggagacgcttgatcagctgacagagctgttcggctttgaagtcacatatcttccggccgatcaaaacggcttcgtttctttgaaagacgtcaaatcggctatcaggccggatacgataatcgtcagcgtcatgcatgtcaataacgaagtcggctccattcagcccgtaaaggaaatcggcgggtttttgaagcagcaccggaatattctgtttcatgttgatcatgtgcagggcattcataaagttcctctgtctatagaagaagcgggcattgacctttgcactgtttcagggcataagtttcacggcttaaaagggaccggagcgcttatcgtcaaaaaaggaacgcggctcattccgcttataacgggcggctcgcagcaaaaaggcgtccgggccggaacagaacatacggcaggcgccgtttcccttgcgaaagcgatcaatctttccgcgcgtgacatgaatgagcggctttcttccgtggaggctgccaagaatgcgctcatggaaaggctgagcggggcggacggggtcgtcatcaacactcccgccgaaaacagcgctccgcatatcattaatttttccgttccgggcgtgaaggccgaagtgctgctgcacatgcttgaggaaaaaggaatatatgtctccacaaccgcggcatgttcggcaagagagcataaaccgagccgtgttcttctgcaaatgaataaaggcgaacaggttgcatcaagcagcatcagagtcagcctgaacttcatgcatacggctgacatcacggagccgtttatggccgcgctggtgccggctgttcaaaaactaaaaaaaatgatgaggtagcatatgaattacgatcatattttaatccgttttggtgaaatatccacaaaaggaaaaaacagacgcagttttattgaaagattaaaacaaaatatccgcctggtattaaaggattataaaaaagtaaaatacttttcaaaccgggaccggatgtcaattacacttaatggagaaaacccggagggaatttgttccttattaaagaatatattcggcattcaaagtttcagtctcgcaattaaatgcgaaagcaagctggaagacattaaaaaaacggctttagccgcgatagaaggcgaatataaaccggggaatacgtttaaggtcgagaccaaacgggcttacaagcagtttgaattagatacgaatgcgatgaacgctgaaatcggcggccatattttgaaaaacacggatggattaaccgtcgatgtgaaaaatcccgatattccgcttcggattgaaatcagggaggaagcgacattcctgaccattcgtaacgaaaaaggcgccggaggccttcctgtcggttccgcgggtaaagcgatgctgatgctttccggcggttttgacagtccggtcgccggtttttacgcgatgaaacggggattatcagttgaagccgtacatttcttcagtccgccgtatacgagcgaacgggcaaagcagaaagtcatggatctcgcgggatgcctcgcgaagttcggcggcagtatgacgcttcatatcgtgccgtttacaaagacgcaggaactcatccaaaaacaaatcccggaaaactatacgatgacggcgacgcggcgtcttatgctgcaaatcgcggacagaatcagagaagaacgaaaagcgctcgcgatcattacgggggaaagcctcgggcaggtagcgagccagacgcttgaaagcatgtatgcgatcaatgccgtgacggcaacaccggttttgcgccctttaatcggaatggacaaaacagaaatcatcgagaaatcaaaagaaatcggcacttatgaaacaagcattcagccgtttgaggattgctgcaccatctttacgccgccaagtccgaaaacgcgtccgaaaaaagaaaaaatcgagcacttcgaaagcttcgttgattttgaaccgctgattgcagaggccgctgccggcatcgaaaccatcactgtttactcagagcaggaagctcacgataagtttgccggcctgttttaaaactgtatacaattaccaaagtttttttgaatgaagacatgtgttttatcacattctatactcacaaggaggtgatacacatgtcacaacaatcaaacagcggaaacagcaaccagcttttagtgccaggcgctgctcaagctatcgaccaaatgaagtatgaaatcgcttctgaattcggtgtaaaccttggaccggaaacaacttctcgcgccaacggttctgtcggtggagaaatcacaaaacgtcttgtctcttttgctcagcaaagcatgggcggaagcagccagcagcagttttaatcacaacttcacataatggctaagagagcggggaattccccgctcttttttcatgagtatagatagaaggctggaagcaatttatgcatatttttattgtaatggcctatgtttatgtataatggggaaagaaagtgaggagttgttcgtgttaaaacgagaagatttaatcgccccaaagaactataatcttgtaaatgaaatcgaaaagttcagccgttccaaagagaagaacgcgcttatttgggaagatcaaacaggcggcaagaaagtctggacgtatgaaaaattgatggaagaaacgaataaaatcggagcccgcctgaaaggtctcggatttgaaaaaggcgataagctgattgtcatggttccgagagtgcttgaagcgtatgccgtttatttagcgatcttaaaagcggggatggtcgtcattccttgctcggaaatgctgcgcgccaaagaccttgaataccggatcaaacacgccgaagtgaaaggcgctatcgtttatccttcatttataaacgcatttgacgaggtgaataccgagcagctggtgacattgtcaatcggtgaaaatgatgccggctggaaaaacctcttaacgattgaagcggacggaaacagttttcaaacagctgatacaacaagagaggacatggcgtttttgtcctatacttcaggcacgaccggccagcctaaaggcgttgtacatacacacggctgggcctttgcccatttaaaaacatcagccggtgcatggctggatatttccgaagacgatacagtgtgggccaccgcggcgcccggttggcagaaatgggtgtggagcccgctgctcgccgttctgggaagcggcgcgacaggattcatttatcacggcagattcaacgccaagacgtatttagagctgctggagcgccatcaagtaaatgtcttctgctgtaccccgacggaataccgcctgatggcaaaagtggaggagttggacaaatatgatctttctgcccttcacagcgcagtttctgcgggtgagccattaaaccgggaagtcattgacgtattccggaagcatttcggtattaaagtgagagacggatacggccaaacggagagcaccctgttagtcggcgtcctgaaggatatggatattaagccgggaagcatgggcaaaccgacccccggaaatcaagtagagattataaacgataagggcgaaatatgcgaaacaggcgaaacgggcgatatcgccgtgcatttgagcacaccggccttattcaaggaatattataaagatcccgaaagaacgaaaaagcagattcgcggagattattttcttacaggagaccgcgcgaaaaaagacgaggacggctacttttggtttgagagccgcaatgatgacattatcgtcagctccggatatacaatcggaccttttgaagtagaggacgcgctcgtgaagcatccggaagtgaaagaatgtgcagtcgtggcaagcccggatgaaatcagaggttcaatcgtaaaagcttatgtcgttttacaagacgatgaaaagcggagtgacgaacttgtcaaagaactgcaaaaccacgtaaaaacgattacggcgccttacaaatatccgagagagattgaatttgtcgaaagcctgccgaaaacggcgtccgcaaaaatcagacgtgtggaactgagacagcgtgaagaacggctgaaggctgataaaaaagcataatacaggataaagggtgagcggggatgaaagcgatttggcacggcggcaccatctatacaatgcttgacaagaatcatgtcactgaatccgtttataccgaagaaggcgtcgtcaggaagacgggcagctatcgggagctccaaggaacatacggttcgcctgatacggaggaaatcgatttacatggagctgtcatgttcccggggtttacggacagtcatatgcatttaatcggacacggggaaaaacagcttcgcctcgatttgtcgcagctgacgtcaaaagaagcgatcctgcgggccgcaaaagaagcagagcgtgaattggaagatggcgaatggctgatcggcgaaggctgggatgaaaacctgtttgaacggccggattacgtcacgaagcatgaccttgacccgctctttcccgaccgccccgtcctgctgaagcgggtatgccggcacgccgttgcggttaattcggccgcattgcgcgcggcggggattacaaacgaaacatctgatccaaacggcgggattatcgtccgggacggcaccggtccgacaggccttctgctggataaagcccaagagcttgtgacacaggccctgccgcccgtctcacttcactatgtcaaacgcgcgcttcaaacggcgattacggactgctggtcaaaaggcctgacaggcgggcattcagaagatctggcatactacggagacgcgtccgttcccgttgccgcgtacgagtctttaaccggcagcggcctttatccttttcgcgcccatctgctcgttcatcacgaagccgtcgacagctggagcgctctggataaatcgaccggaccttacctggaatacggagcgatgaaaatttttgctgacggcgcgctcggaggcagaaccgctctgttgaaaaagccttatcatgatgatccgtcagtttccggcgttcaggtgcacgatgacgagacccttgccgctcttgtttataaagcgagagagaaagggatggagatcgccgtgcacgcgattggcgaccttgcatttgaaaaggtgctcgatgttatcgaaagatacccggcaaagcccggacagctagacaggctcattcatgcgcaagtattagatgccggattgattgaaagagccgcccggctgccgatcggacttgatcttcagccgcattttgtggccagtgattttccgtgggtgattgaccggctcggagaagagcggatgaaaacggctttcgcctggaaaacactgctgtcaaaagggctgctgtgcgccggaggctcagacgccccgattgagccggccgatccgcttctgggcattcaatcggctgtgctccgtacaagcaagcagcatccggaaggtccggcctattatgaaaaagagtgcctgaccgtgtacgaagccattcagctttacacggagggaagcgcggccatcatccataaagaacatagccgcggacggatcgcccccggctatgatgccgactttaccgtactcagcggtgatccgttcgggacggatccgaaaaagcttcatgaattggaagctgtcaaaaccgtcgtcggcggccgtatcgtatatgaaaaagaggacaggcagtgatgcccgtcctctttttttatgataaaaatgatcgctttactttttcccagaaagagttgtctttcagtttcaccgttttgatttttttatcggatagtgtaatctcaacctttttgacattccgcgtgctgagcgcttcattatcaagcccgataatcggatgctcattgccgtcctggaccacctgcagtgtcagcttccggtctgagcttaaaataaacggagatccgagtgtacggtatgtgttgttgttcaacgacgccagttcggatacctgcatgcaggaaatcaaaggatcaacaacggcgcctgaaacagatttattgtaggcggtgctgcccgtcggggtggaaatgatcatcccgtctcctctgaacgtctcaaaatgaagatcatcaattaacacatccatcacaaacgttttaataatgcttgaacggatggaaacctcgtttaaacagtgaaaatgattgctgccgtccaccgttacatgaatgagcgggtattttctgacctcaagctgttccgcggtcatgctggccgccattttttcaggctcatcgctgtgaaaatcacagtacaaatgggctttcccttttttagcgatgccgacatacaggcagtcatcacggaatccggtttttctgacggcttgcagaaatgagccgtcgctgccgatgctggcgataattccggcatcctccgggtgagccgcaactgtaaaaccgtgcgattcagcaagctgcttcaaagagctgacttgttcttttgtttcgttgttttgtttgtgaaaaaaataaacattgcggcgaagatcggtcatatccccattcccctttgctgtcatatttacgtttttctcccagcaggtattgtgttaaaatacctgtggcaatagtgtaacatgtttcctgtttatccgttaagagaaagcgcttcatgaaaaaaatgaatctttttttacgggggaacgtacgaatattgacagaaaaggaggagaacaaatgaatgcaaaaagatggattgcgctcgtcatcgcgctcggcattttcggcgtatcggtcattgcaagtgtgaccgtcggggtgctgaagaatatcggagatacagggtctgactttgcatcactgacagatgacacagaggaagtgacgctggataagggcagccccggcagtaaaatcgccgtgcttgaagtggacggcacgattgaggataacggcgggtccgctggcctgctcagctcaggcgggtatgatcacagatcatttttaaaacaggttgagcgtgcgaaagaagataaaagcgtcaaaggaattgtactgaaaatcaattccccgggcggaggcgtgtacgaaagcgcggaaatacataaaaaactggaagaactaaagaaagaaacgaagaaaccgatttatgtgtccatgggctccatggcggcatcgggaggctactatatttcaacggccgccgataaaatctatgcttcaccggaaacgctcacgggttcactgggcgtcatcatggaaagcgtcaattattccaagctcgccgatgaactcggcatcaagtttgaaaccattaaaagcggcgcgcataaagacatcatgtccccgacccgcgacatgacgaaggaagaaagaaagatcatgcagacaatggtcaacgattcttatgaaggatttgtcaatgtcatttcaaaaggccggcacatgtcaaaagcggatgtgaaaaaaattgccgacggccgtgtttacgacggcagacaagcgaaaaaaatcggcctcgttgatgagctcggtttttacgatgatacgatcagcgcgatgaaaaaggaccataaaaatatgaaaaacgcttcagtcatcacatacgaggaaggattcggattaggctcgctcttttccatgagcgcagcgaaaatgtttaaaagcgaaattgattttctgaatatgaaagaactcatttcgcaatccggttcgccgcggatgatgtatctctatgcaaagtaggggggaagaaagaatggacgcgacttacgaaggctttcacggcaaagaagaggaagccgaacaacagagggcgcccgagcaggcatatgcgggcttttggatcaggttttgggcgtttcttcttgattggctggtggtctggggacttaaccatctcatcgtttcaccgattttcacgctgatgaagctcccggcaacaagcggaatgtttacaatctcagcttattccgtcacaaccctgatcgtctacctcgcctattttgtgttcatgacgaaatggtttcatcagacactcggcaagatggtcttcgggttaaaggtcacttctttgacgcccggaaagccgctgacttggagcaccgtcattttcagagaagcggtggggcgttatatcgataaaatctggattctctatatcgtcattgcgtttacgcccaaaaagcagggcattcacgatctgatcgccgacacaacggtgattcacgaagcgctgtaccgcaaataaaagcagtaaacccggaataaacgtccgggtttattttttttggttttggcgataatgctgctaaggaagtgaagcctatgggatatgccgcagcagctgttattctcattctcattttggtctggctgctcatgaggatgaaaatccatctgactttcgaatatcttcacgataaagataacgacaaactgacgtttaaactctcggccttatacgggctggtccgttttaaaaaaacgctgcccgtcattaaagtaaacagcgaagacgcgtctattgatgtcaaacaggacacgaaatcagaaatgaaaggtcagaaaaaagagaagaaaaaaatcacatatgaagatgtcaaacagagcattcacagaatagaaatgattctgcaccaagtcttgcagatgcgccaaatcgccgcctcatttcttgcgggagtccgtgttacgaagtttgaatgggtgacggttatcggaataaaggacgccgccgttacgggaatcgccgccggcggattgtgggccgtaaagggaggccttacggcgatgctgtatgatcatctgcgtttcatacataaaccggtgtgcgaagtcattccgtcttttcaagtgcctgcatccaagacgcatttgcagtgtatattcttttttcgttttggacatcttataggtgcagctttcaaattgctcaaatacgggcggaacggactttctatcatacgaaagaaacagccggttccggttgcttcaaagaatgattcatcagtttaaggaggagcgcatatggcagaccaccccattcaaggtttaatgaaaaccgctatggaaaatttaaaagaaatgattgacgtgaatacaatcatcggcgatcctgttgaaacgcctgacggcagcgtaatcttaacggtttcaaaggtcggattcggatttgcggcgggcggaagcgagtttggaggaaagccggctgaaaaaagaaccgatgatgatgaaagaaaagagcagaaactcccgttcggcggcggaagcggcggcggagtatccattacgccgattgcgtttctgattgtcggaacaaacggcgtgcgtatgcttcatttagacgaaaacacccatctgattgataaactgttagactccgcgcctcaaacgattgaacgcatccagcatatgtttaaaaagaatgaaaaaggccggaaccaaaaaagaacggatatcgatttataacagaaaagttaactgccgcccgcagttagctttttttacgatgcggcataacctttgcagtttgcataaaactcgactatgatagagctatacatagataaagggaggaatcagaatggctgaaattacatttaaaggcggagccgtgacgctgatcggacaagaagtgaaaccgggtgaccaagctcctgacttcacggttttgacaaacggattagaagagaagacattagcagatatgaaagggaaagtaacgatcatatccgttattccttccattgacacaggcgtatgtgacgcgcagacacgccgcttcaacgaagaagccgcaaaactcggtgatgtgaacgtttatacaatcagcgccgaccttccgtttgcacaagcgcgctggtgcggagcgaacggaattgataaagtggaaacattatcggatcataaagagatgtcatttggtgaagcattcggtgtttacatcaaagaacttcgtcttttggcgcgttccgtattcgtccttgatcaggacggaaaagtcgtttacgcggaatacgtaagcgaagcgacaaaccacccgaattatgaaaagcctatcgaagctgcaaaagcgttaatcaagtaaagagagaaaaagagctccgggtgctgccgcggagctcttttcatggcaaggaggaaacagcatgcaacacgatcatgtcggtcagatttatgaacttttagatgaagccgcccaagtgatagcagaaggccttgagatttcttatattgaggggcttgcggaggcgggagagatgtattttcttgaaacaacggaccagcttccgcttcaggaaaaacaaaccggcgagcttaaaagcctgcttgcgaaagcagacttcagaaaatgggagcatgaatggatccgcaaggcgttccagctcgccattttaaaaggactgaaagataagtcccatccgaacagacagatgacgcctgatacgatcggccttttcatcagttacctcgtgaataaatttacgggcggccgaaaaggcctgacgttgctggaccccgcctgcggcaccggaaatcttctgctgaccgcggcaaaccagctttctgacaaagcgggaaaaagcttcggcattgaaatcgacgatgtccttctgaagatcgcatatgcgcaggcgaatctgcaggaaaaagaaatggagctgttctgccaggacagtcttcagccgttatttatcgaaccggccgatgcggttatctgcgatttgccggtcggctactatcccaatgacgaaggcgctgaagcgtttgagctgaaagcggatgaaggccactcatttgcccaccacttatttattgagcagagcgtcaaacatacaaaaccgggcggatacttattttttatgattccgaaccatctgtttgacagcgcgcaaagcgataaactgaagcggttttttgcggaaaaagtatatatcaacgccctgcttcagctgccggctactatgtttaaagatgaagcgcaggcaaagagcattttaatcctgcagaaaaaaggcgaagacgcaaagccgccgaaacaagcgcttttggcgaatcttccttcttttgcgaaccagcaggcgatgcgggagatgatggcaaaattggatcagtggattcaaaaagaaaaataatggcgaaaaagcagtgtgagacgcaaaattccgcgctgcttttcgctttttaaaatgaatggaaatcagggcgaaaacacaaattaaggaaagaaaataacattccgtaaggccgtgccgtccatttggcacaaatgagatttatcagaaaatatcgacttcgtattgtaagcggtaccaatgtggatgttgacttgaaatgctgagttgacaatgtttaaatggaaaagtcagatattttttggaccgcagttatggtctgggaaaaaagaacgaacaaacgaagaagaattttgataggagcgtcatttatgtctaaaattattgcaattaacgcaggaagctcatctttaaaatttcagttattcgaaatgccttcagaaaaggtgctaacaaaaggtttagtagaacggatcggtatcgccgacagcgttttcactatctctgttaacggcgaaaaaaatacagaagtgacagatattccggatcatgcggttgcggtgaagatgctgcttcacaagctgactgaattcggtattataaaggatttaaacgaaattgacggaatcggccaccgtgtggttcacggcggagaaaaattcagcgattctgttttgcttacggatgaaacaatccgtgagattgaagagatttcagaacttgcgccgcttcataacccggctaacatcgtcggcattaaagcctttaaagaagtgcttccggatgtgcctgcggttgcagtgtttgatacggcgttccaccaaacgatgcctgagcaatcttacctgtacagccttccgtacgaatactacgagaaatacggcatccgcaaatacggtttccacggcacttctcataaatacgtgacacagcgcgcagctgagcttctcggccgcccgcttgaagatttgcgtctgatttcctgccacctcggtaacggcgcaagtatcgcggccgtagaaggcggaaaatccattgatacgtcaatgggcttcacaccgcttgcgggtgttgcgatgggaacacgttcaggaaacatcgaccctgcattgatcccgtacattatggaaaaaacggatcagacggcagatgaagtattaaatacattaaataaaaagagcggactgcttggcatatccggtttctcaagcgacctccgcgatatcgtagaagcttcaaaagaaggaaacgaaagagcggaaacggctcttgaagtgtttgcgagcagaatccataaatacatcggttcttacgctgcgagaatgagcggcgttgacgcgattattttcactgcgggtatcggtgaaaacagcgttgaagtcagagaacgcgtgcttcgcggcttagaattcatgggtgtatattgggatcctgcgctgaacaacgtgcgcggcgaggaagcgtttatcagctaccctcactctcctgtcaaagtcatcatcattccgactgacgaagaggtcatgatcgcacgtgacgttgtccgtcttgcacagtaatgatcgaaaaaagcacatcctttagggtgtgcttttttattgaatgccccagaatcaaacgttacgatatgtttaatacataaacgatgaggtgaagcaatgagtgtgcatgaacataaacaagaagccccgtcagccgtgcgctgcaaggtgataacagtcagcgacacgagaacgaaagaaaccgacaaaagcgggcgcgtcatgatggatttcatcagagaagcgggatttgaaacggtcgcttatgacattgtaaaagatgaaaaagatgaattgcagaaagccgttttatccggctgtatggatgaatatacagatgcggtgctgttaaacggagggacgggcattgccgaaagggatgtcacaattgaagcggtcacgccgctgttttcaaaagaactcccggggttcggcgagctgttccgcatgctgagctatacggaggacatcggctccgccgccattttgtccagagcggcagcgggtgtgatccgaaataccgcagtcttctgcacgcccggctcctcaggcgccgtaaagcttgcaatgagtaaactgattattcctgaactgcctcatgtgctccgggaaatccgaaaagatttataaatgtataaaaaggctctgctccgctcaaaaaattgggtggggttttttttataaaaggcttgaaaaaacagaatttacttgttacagtgtatacatacaaaatgcatttttattaattaaaactaatttttatacaaagggagcttttaacatggcagaacaaaaaaaggttgtattggcatactcaggaggtcttgatacttctgtagcgataaaatggctgcaagaacagggatacgatgttgttgcctgctgcttagatgttggggaaggaaaggatttggcattcgttcagcaaaaagcgctggaagttggcgccgtaaattcctatgtgattgatgcgaaagaagaattcgcccgggagtacgcgctcatttctatgcaggcccatacaatgtatgaaggcaagtatccactcgtatctgcactatcccgtccgttaatcgcgaaaaaactcgtggaagtggcggaaaaggaaaacgcggtggccgtagcgcacggctgcacgggaaaaggaaacgatcaggttcgtttcgaagtatccattaaatcattaaatcctgatctggaggtcattgctccggtccgtgagtggcaatggtcgcgtgaagaagaaattgaatacgccgcaagccgcggcataccgattccgatcaatcttgacagcccgtattccatcgaccagaacctatggggacgcgccaatgaatgcggtatattagaagatccgtgggcggcgccgcctgaaggggcatatgacctgacagcatctcttgaaaacacgccggacgttccggaaatcatcgaaatcgcatttgaagccggtgttccggtttcaatcgacggcgtaacctacccgctcgctgatttaattctcaagctgaacgagactgccggaaaacacggcatcggccggattgaccatgtggaaaaccgcctggtcggcattaagtcccgtgaagtttatgagtgcccgggcgccatgactttgattacggctcacaaagagcttgaggatctgactttagtgaaagaagtggcccatttcaaaccggcaattgaacaaaaactgtctgaaatcatctataacggtttatggttctcgccgttaaaagacgcgctgcttgcattcctgaaagaaacccaaaagcatgtcaccggcgttgtgcgcgtcaagctgtttaaaggccatgccattgtagaaggacgtaagtcggaatattctctctacgacgaaaaacttgcgacatatacaaaagacgatgcgtttgaccatcacgcggcaatcggtttcattgagctttgggggctgccgacaaaagtaaacagcattgtgaaaaagaaggagcagattgaagcatgaagaagctttggggaggccgttttcaaaaaacaccggaaaagtgggtcgatgagttcggcgcatccatcacattcgaccaaaacttagtcaaagaggatattacagggtctctcgctcatgcggcaatgctgaaaaaatgcggcattctgacggaagaagaagaaggtgccatccgtcaagggctgcagactctcctgcaaaaagcagaggaaggagcgcttgaattctctgttgattatgaagatattcatttgaacattgaaaaaatgctgattgaagaaatcggaccgctaggcggcaaactccataccggaagaagccggaacgaccaggtggcgactgacatgcatctatatttgaaagatcatgtctcgcatatcatcgtgctgattgaacagttccaaaaagcgctgatcgaaaaagcggaggccaatgtcgagaccattctgccggggtacactcatttgcagcgggcccagccgatttctttcgcccaccatctgcttgcttatttttggatgcttgaacgggataaagagcgttttcgggatgctatgaagcggattaacatatcgccgctcggatgcggggcgcttgccggaactacgtttccgatagaccgtaactattcggcggagctgctcggttttgactccatttacgagaacagtcttgacggagtcagtgacagagattttattctcgagtttttaagcggcagcagcatgctgatgatgcacctttcacgtttgtcagaagaaatcattctatggtgctcgcaggaattcagattcattgaactggatgatacgtacgcgacgggaagcagcatgatgccgcagaagaaaaaccccgacatggcggagctgatccgcggtaaaaccggacgcgtatacggtgatatgatgggtcttttcacaattatgaaaggactcccgctcgcttacaacaaagacctgcaggaggataaagaaggcatgtttgacacagtaaaaaccgttgaaggaagccttcagattttcacgggcatgattgaaacgatgaaagtaaacaaagacatcatgaaacaagcgacaaaacaagatttttcaaacgcgacggaacttgccgattatttagctaaaaaaggcatgccgttcagagaagcgcatgaagtggtcggcaagcttgtgtacagctgtattgaaaaaggaatctatttaagtgacatggcatttgaagaattccttcaagccagcagtctctttgaagaagatatctataccgtgctcgatccgcatcatgcggttgaaaaaagaatgagcgccggcggaacgggttttcagcaggtagaacaggcgctcgtaaaagcaaaagcctgcgccggcatttaatttgctgaaatttccttcatattttcccgtcatatcagacaccctacatctataaaagatgggaggtaaaaggaatgcgcaaagaacaagaccgttacatctatgatgaaaaagaaagtgaagaaacggccaggcttatctcagaggcataccaaagcggttatgtcggcatggaggaagcctctgctccttcagaaaattaagctgtctgtaaagacggcttttttttcgtgcggacgaagtgcaaaaaagtgatattgccgtttgtttatagtaaagtagagggagaaacgtcttgattttattgaagcggctacgttgcctggggagggtattcaatgtgcgacatgctctaatcactgccggtacaaagggattgggccgaaaagtgactgaaatgcttctggaaaaaggcttttctgtcacagtgaattacagacaggacgaagaagcggtcgcttgtctgaaggcggattatcccgggtgccatgacagattgcaattcgttaagggcgatgtaacccggaaagaagatctcatgcggatcgccgatgcagcccttcagcggtttggaaggattgacatactgattaacaatgccgggccgtacatatttgagcgcaaaaagcttgccgattactccgatgacgaatggtatggcatgcttgaagggaatttaagcgccgttttccatctgtttaaagcggttatcccggtcatgagacagcagcgcttcggccggattattacatacggttttcaaggagcggaccatgcccccggctggcttcaccgttccgctttcggagcggctaaagtcggattggcttcgttaacgaaaaccattgcgattgaagaagccgaatcaggcattacagccaatatggtctgcccgggtgatattgtaggagatatgaaagaagcgtctatagaggaagcaagacggaaaatcggcaaagaaaagacgccgatcggcaggtccggaaccggagaggatattgcgagaatcatcgcgtttttatgtgaagaagattccgatcttgtaaccggaacggtcattgaagcaacaggcgggctgaatgtgattaacaggcatcaatccctgtaagttttttcgtttgtcaaaaagggaacttgataaatattaattttttatgaggtgaaaacgatgaaagtgacttatcacggacattctgtcattcaagtggaaacgaaaacccataacattatttttgatccgtttctgaccggaaacagtctgacaaatttgaaaccggaagaagtgaaagcggatgtcatcctgcttactcacggacacaatgaccatgtcggagatacagagcagatcgccaaacaaaacgatgcgctcgtcattgcgccgaacgagctggccgtttatctcggctttaaaggtttaaaggtccacccgatgcatatcggcggggcgcaccaatttgatttcggcaaagtaaaactgacacaggcgttccacggatcggcggtcactgatgaagaaaacaaaaccatcacatacaccgggatgccggccgggattttattaacgattgacggcaaaacgattttccacgccggcgatacggcgctgttctcagatatgaaactgatcggggaactgaatcacattgacctggcgtttctgccgatcggtgataacttcaccatggggcctgaagatgcgaaactcgcggctgaatggctgagagcgaaacaggtcgttcccgttcattacaatacattccccgtcattgaacaggaccctgacgctttcgctgaaagtctgcccggaggcgtcggcaaagtcatggcggtcggcgagaccattgagcttgcctgacatatgtgtcaaagaccttctgaatcaagcattcagaaggtcttttttgtggtgccgccttttttcgggcgtctcattgcgaatgaatcccccgtacccttataataaaagcagaagactgtccttagaggtgaaacgcttggcaacaaagcatgaacaaatcctatcatacatagattcgcttcctgtcggtgaaaaaatttcggtcagaagaattgcgaaagaaatgaaagtcagtgaaggaacggcttacagagccattaaggaagccgaaaacaaaggattcgtttccactattgaacgtgtggggaccatccggattgaacagaagaaaaaagaaaatattgaaaagctgacatacgctgaggtcgtcaatgtgatcgacggccaggtgctcggcggaaaagcaggtctgcataaaacgttgaataagtttgtgatcggggcgatggagcttgacgcgatgatgcgttatacggcggcggggaacctgttaatcgtcgggaaccgaatcaacgcccaccgccaggcgcttgaagcgggcgcggccgttttggtaacaggagggtttaataccgacgacagcattatcgagctggccgatatgcttgagcttccgattctctccacgagctacgatacctttacggtagccgcgatgatcaaccgggcgatctatgatcagctcataaaaaaagagattgtgctcgtggaagatattttgacgcccgcagatcggacagtgacgctgttccctaaggataaactggagaaatggtacgaaaagaactatgaaaccggacacggccgctttccggttatcgatcagcagatgaaaatccacggaatcctcacgccgaaagatatcgcggggcatgaccggtcagttcccattgaaaaagtaatgaccaaaaaccctgtcacggtgatcggaaaaacatctgtcgcctcagcggctcaaatgatggtttgggaaggaattgaagtgcttccggtgacagacgggcatcacaaactgatcggaatgatcagccgccaggatgtcttaaaagcgcttcaaatggttcaaaagcagcctcaggtcggggaaaagctggatgatattgtttcaaggggatttaaagaagaggaagataacaaaacgccggccgtttatcaatatgaagtcacgccgcaaatgaccaatcagctcggcacgatttcttacggggtgtttacaacgattttaacccaggccgccagccgatttttacgctcccgcaaacgcggcgagctggtcattgaaagcattacgattttcttcctgaagcccgtacagatggagtcggtcatagaagtgaaaccgcgcattttagaggcgggccggaaattcgggaaaatggaagtggaagtgtcaagccaaagcggcatcgtttcaaaagcgatgctcatggtgcagctgatggagagaagttaagggacacacccgggtcccttggcattcattatgcgtggtccctctccgcttcctttgcatggatgggctcataatgcttataggctttatacccggcccatgcgctgcctgctccgattaaaatgaagacgccgccgatgaccagggtcaggacggagtggaacagaatcatttggtttactccgtacaaaagcaccagcgcgcctaatgccatacttgatttagccgaaaaacattccttctccagcgcccgtttcgtctggattccttttactttgtaatacacgtaaaagcaggcagaaagcccgatgagaaaaacaaaaaccagcataaatgaaatcctccattatatgagtttgcaaaaccgtttataccgttgctgaaagattttccttttccatggataaagagtatgattaaatgaataaaaacgaaaaggagaaaacgatgaaatccgaactgatcagaaccatatcattatatgacaccattatcttacatagacatgtgaggcctgacccggatgcctacggttcacagtgcggccttacagaaatcctgcgggaaacgtatcccgaaaaaaatatttttgccgtcggacagcctgaaccgtccttgtcttttttatattccctcgatgaggtggatgacgaaacctataaagatgctcttgtcatcgtgtgcgacaccgcaaaccaaggcagggtcgacgatcagcgctaccattccggcgcaaagctcatgaaaatagaccaccatccaaatgaagatccgtatggcgatctgttatgggtcgatacgaatgcaagctccgtaagcgaaatgatctatgagctgtacctggaaggaaagcagcacggctggaaactgaatacgaaagcagctgagctgatctacgctggtatcgtcggtgatacggggcgcttcttattcccgaacaccacaaaaaagacattaaaatacgcgggagagctcattgagttcccattttcatcgtcagagctgttcaatcaattgtatgaaacaaaattaaatgtggtgaagcttaacggctttatttatcaaaatgtgtcactgtctgaaaacggcgtcgcttccgttttcattaaaaaagacattttggagacatatggaaccaccgcttctgaagcgtcgcagcttgtcggaacactcggaaatatttcgggtatccgcgcttgggtgtttttcgtagaagaagacgatcaaatcagagtccggttccgttcaaaaggtccggtcatcaacggaattgcccggaaatacaatggcggcggacatccgcttgcggccggcgcatccatcttcagctgggatgaaaccgatcagattcttgctgatctggaagaggtatgtaacgaacacaagtagaggggagaccctctttcttagtgttcatctgtcacggggatgaaccagcagccgaattcagtcaggtcttcgtagacgcggagattacagatttggagttctttttttatgagggaagcgagtgtgtctgtttctgcatatgcggaatagccttgtctgattcgggctgcatgatcttttgccaagcggcgttcactaaaaacctccattttcccttcctcccttcagaatcgttgaaaatgtctcatctacagtttataaaaaagcggagaaaaaagcgacagatctatggaaaatttttaaaaataacataattacgtcgcaaaagaaatatgaatttcgacagacaatctcgtataaatcgtcagttcctttacttcagctttaaattccttctcatttatggtgtatattttgttttcaattgtccgttttaaaagctcctttgttttatacacgctttcaatatcctttgtgatgacttcagaaatattatctttcacctgttcctcaaatttcatcttgtcaggctgggcgattctgtatttttcccaattaatcagcttcacatcaacactttggatgagaagtctttgcttattatcctcatttaatttatgaagatctttctgatagatggagatttggttttttaaatcccgcgcgtgctcccgctgcttttcaattaacgtcacctgttcttcctgaaacgttccgtatgtaaacagaaagaacagccagctgatgatggctccgcacatcattcccgcaaaaaaacgctgccatcccggttttttataatactcgggaattctcatgatgacatattctcctgggtcagccatgaaataatcagccagccggtctgcgcgccgcccattgctgaaataattaaaagaagctgtttgaagatgtcgcgcgtgttgccttcaaacagcccccgctcgaaactgtataccgcgtcaaatgttcccccgatggccgcgacaagcgcccagatcttcagcctgttcgccaattttgtgatcgccgtcagcggaggctcgcctgataaataagctccgaggccgccgatcagcgcgccgccgagcaacacaccgagggcgataaaataactgctgatgaaattcgccataaagccggcttcctgatccatatatacaccacctcacttttctatcatattgagcgaaacggacaagtatgatgatgagtcaaaaaagaacatttgtttcttaagaaaacccgtcttataatgtagaaagacaaaatgaacgtatgggaaaggagtggcggcattgtcttttgttcacctgcaagtacatagcggctacagcctgttaaacagcgccgcttctgtaaaagagcttgttacacaagcgaaggaactcggatattcatcattggcgctgacggacgaaaatgtgatgtacggcgccattgagttttataaagcatgcaaatcaaacggaattaagccgattatcggtctgacggcttctatatacacggacgatacggagcttgaagcacacccgctcattcttttagcggagacaaacaccggttatcagaacctggtgaaaatctcaagtgcgctgcaatccatggcaaagggcggcatgaagcgaaaatggatgaagagctatcatgaggggctgatcgccattacgcccggtgaaaacgggtacattgaaagcctgcttcaagccgggaagtttgaagaagcggtccgggctgccgaaggattccgggagctgttcggagacggccgtttttatttagggtaccagccgtttaaaggacatgagacgttatcagaagagattctccgcctgtcagccgagacggaaatcgctgtctgcgctgcgggagatgtccgctatatcaagaaagaagatcaagatgcgtaccgctgtctgtgcgctattaaagccggagagaaatgggaggatcagagcgggaatctgccggacttatacttgaggacgcctgaagaaatggcagagctttacacgcggcatccggaagcgattgaagcggccgcccgtatcgcccggcaatgccgggtcgatgtaagcctcggacagacacagcttccgtcttttccggcgccggacggcaaatcagccgatgactatttggcggagatctgtcatgaggggctgcgtctccgtttcggcactcctgatgagcgggctgtccgccggcttgaatatgagctggacgtcatcaggcgcatgaaattcagtgattattttctcatcgtatgggactttatgaagtacgcgcatgaaaagggcattgtgacaggcccgggaagggggtccgcggcaggctcgcttgtcgcttactcgcttttcattaccgacgtggatccgcttaaacattctctgctgtttgagagatttcttaatcccgagcggatcagcatgccggatattgatatcgatttccctgatacgagaagggatgaggtcattcagtatgtacaaaataagtacggggccatgcacgtcgcccagattatcaccttcgggacattggccgcaaaggcggcgttaagggataccgggagagtgttcggaatcagcccgaaagaagccgaccagcttgcccgcctgatcccgtcgaaaccgggaatgacgcttgaggaggcgaggcggcagtccgctcagctgaacaggcggctgtccgaatccgccgttcttcataaagtgtttcagatcgcaaggaaaatcgaaggtcttccgagacacacgtcaacacacgcggccggggtcgttctcagtaaagagccgctttcggaagttgtccctcttcaagaagggcatgacggcgtgtatttaacgcagtatgcgatggatcacctggaagatctcggtcttttgaaaatggactttttaggtttgcgcaacctgacgcttattgaatccattaaaacgatgattgaaaaagagacgaatacgaaaattgatttttccgagatttcttatcaggatgaaaaaacgttctcgctattgtcaaacggtgatacgacgggtattttccagctggaatcatcaggaatgagaaacgtgctgaagcgcctgaagccgtcaagactggaagacattgtcgcggttaacgcgctttacaggccgggaccgatggaaaatattccgttatttatcgatcggaagcacggacgggcgcgtgtggaagtgccgcacgaggacgtaagaaatattctcagtgacacttacggcgtcatcgtctatcaagaacagataatgatgatcgcctcgcgcatggcagggttttcattaggtgaagcggatctgctcagacgggctgtcagcaaaaagcaaaaggacattctggacagagagcgaagccattttgttgaagggtgcttaaaaaaggagtattctgtagtcactgcaaacgaggtctacgatctgattgtaaaattcgctaactacggattcaacagaagccatgctgtcgcatacagcatgatcggctatcagctcgcctatttaaaggcgcattatccgctatattttatgtgcgggctgttgacgagcgtcatcggcaatgaggacaaaatatcgcaatatctgcatgaagcgaaggggagcgggattcaagtccttccgccgtcaataaacaaaagcggttttccgtttgcgccggaaaacggagccgtcagatacagtttgcgggccgttaaaaacgtaggcgtctcggcagtgaaagatatttataaagcaagaacacataaaccgttcgaggatcttttcgatttctgctttcgcgtacctgcaaaaagcgtgaatcggaaaaccatcgaagcccttatattttctggcgccatggacgaattcaatcaaaatcgcgccgccttgctggcctccgttgatgtggctttagagcacgctgaactttttcgtgcagacgatgaccaaatgggattgtttttggaagaatcgttttccattaagccaaaatatgtagaggctgaggaatttccgctcgtggacaagcttcggttcgaaaaagaagctctcggtgtttatttctcaagccatcctttgtctgctttcagggatctcctgaaaaaacggggggcgcaaacgatcacagcagcgcggcagatgccgaagggacagctgtcaatcggcgctttgctcgcgggcattaaaacgattcggacaaagacaggtcagcatatggcgtttctcacattaagcgatgaaacgggagaaatggaagccgtcgtgtttcctgaccaatatagaaggctgtctccgctgttaaaagaaggcgcgcttttattcgccgccggaaaaatggaagagcgtcaggagaagacacaattcatcatgtcatccgcctctcttcttgaacagacggaggcagacagagcgccgtctgtttacatcaaaatcgaaggcagccggcacaatcaggagtttttggaaaagatgaagcgtattttactggagcataaaggggaaaccggcgtttatctatattatgaaaaagacaagcagacgatcaggctgccggatacttttcatattgaggcggaccatcaggcgttataccgtttaaaagagctgctgggccgcgaaaacgtcgtgttaaaatagtggtaacaataatcgttttgttatacaattgaaacaattgtgctatcttatttaaagattctgaaatttttcacctccagcgattgtaccagtctatgcggcagaatatgtaacaaagtacttaaaaggagtgtttagaatgtcattaagagaagaagcgttacatttacacaaagtaaatcaaggaaagctggaatcaaaagcaaaggtagaagtcagaaacgcggacgacttaagccttgcctactctcccggagtagctgagccttgtaaagagatttatgacgataaaaataaagtatatgattatacaatgaaggggaacatggtagcagtcgtaacagacggatcagccgttctcggtctcggtaatatcgggcctgaagcttcacttccggtcatggaagggaaagcggtgctgtttaaaagtttcgcgggcgtggatgcattcccgatcgcgcttgacacaaacgatgtggacaaaatcattgacactgtgaagctgcttgaaccgacattcggaggtgtcaaccttgaagatattgcggcgccgaactgcttcattatcgaagagcgcctgaaaaaagaaacaaacattccggttttccacgatgatcagcacggcactgccatcgtaaccgttgccggacttgtaaacgcgctgaaattatcaggaaaatccatgtcatccattaaagttgtggcaaacggagcgggagcggcaggcatcgcgatcattaagcttctttaccatttcggcgtacgcgacatcgtgatgtgcgactctaaaggagcgatttacgaagggcgtccggccggcatgaacgcggtgaaaaacgaagtggccaagtttacaaaccaagaccgcaacgatggctcgctgcaggatgtcattaaagatgcagacgtctttatcggcgtatcagtcgaaggcgcgctgacgaaagaaatggtggagagcatggcgaaagatccgattatcttcgcaatggccaacccgaatccggaaatcatgcctgaagacgcgcgcgcagccggcgctagcgtaatcggaacaggccgttctgatttcccgaaccaggttaacaacgtgctggcattccctggaattttccgcggggcgcttgacgttcgcgcgactcacatcaacgaagaaatgaaaattgctgcggttgaagcgattgcttcccttgtttcagaggaagaattaagcgctgattatgtcatcccggctccgtttgacaaacgcgtggctcctgccgttgcgaaagctgttgcgaaagcagcgatggaaacgggcgtcgccagaattacggtcgatcctgaagaagtggctgaaaaaacaagacagctcacagtcatcggggaataataacacaaaaatgaaatggcagcgcgttggaaaaaacaacgcgctgctgttcaatatacggactgctggcatttttttaagggcaggtcttaaaaaaatttcagcagaatccttatttcttttgaaaacgctgacagataaggctgaacaacgctttttacggtatgaaatccgtccgtttccgtctgttttgcagcaaaaaatgtcgaatggaggatgacaccgtttgacaaaaaaagtacaatagtttcggtaaagttattattaagtctatctaatcggaagacatgcagtgaagagaacccttcacaaaagggaggtaatcatttgttaaaggatatattcacaaaaaagaaaaaatatgcttccgtgccgtctgagcaggcaaaacatgatgttccggaaggcattatgacaaagtgccccaaatgtaaaaaaatcatgctcacaaaagagttagataaaaacctgcgcgtctgcatgaactgcgggcaccatttcccgatgaatgcaaagcagcgcattgaaagcctcctggatgaagattcattcgaagaattcaaccagggaatgatatctgaaaacccgctcggtttcccggaatacttagaaaaaatcgaaaaagaccgtgagaaaacatcgctgaatgaagcggtggttaccggaaaaggaaccatcagcggattccctgccgtgatcgcgatcatggattcaacattccgaatgggcagcatgggttcggttgtcggcgaaaaaatcacgcttgcaattgaaaaagcaaaagaggaaaaagtcccgtttatcatctttaccgcttccggcggcgcacgtatgcaggaaggggtcttaagtcttatgcaaatggcaaagacaagctctgcattaaaactgttcagtgaggagcagggactgattatttctgtcatgacccacccgacgacaggcggcgtatcggccagtttcgcgtctctcggtgattataatttcgctgaaccgggcgccttgatcggatttgcaggaagacgtattattgaacagacgatcggggaaaaactgccggaagatttccagacggcggaatttttattaaagcacggccagcttgatgcggtgattcaccgaaacgacatgaaagagaaactcgcatttctgctggacatgcaccaaacaggaggtgagcatgagtggctgcaagattagaatttgaaaaaccggtgattgaactgcagacgaaaattgccgaactgaaaaaattcacccaagattcggagatggatttaagcgctgaaatcgcaaggcttgaagaccggctcagcaagctccaggatgagatttataaaaatctgaagccgtgggacagagtgcagatcgcacgccttcccgaccggccgacgacgcttgattacattcaatacctgtttaccgacttttttgagtgtcacggagacagaacatacggagatgatgctgcgattgtcggcggagtcgccaaatatcacggcatgccggtcaccgtcatcggacatcagcgcggaaaagacacgaaagaaaaccttgtccgcaatttcgggatgcctcaccctgagggctaccgcaaagcgcttcgtctcatgaagcaggcggataagttcaaccgcccgattatctgcttcatcgacacgaaaggagcgtacccgggtaaagcggcggaggaacggggacaaagtgaagccatcgccaagaacctgttcgagatggccggcctgacagtgcctgtcgtttgtatcgtcatcggggaaggcggcagcggaggcgcgcttgcgttaggtgtgggcaaccgcatgctgatgcttgagaactcgacgtattccgttatttctcctgaaggagccgcgtccattttgtggaaagactccagccttgcgaaaaaagcggccgaaaccatgaagattactgcgcccgatttattagaattaggaattattgatgatatgattaaagaagtgaagggcggagctcaccatgatatcaagcagcaggcgggctacattgacggtattcttaaagaaacgttaaaatctcttcttcgattgaacgccgaagagttgatctcacagcgctatgaaaaatataaagcaatcgggaaagtttcggttgaggatcaatatatcggggtaaactgaatagacgtgaagcctatggctcacgtttattttttgtgatttttgtgatattccttaaattttatttaaaaacaatttatttaattgtataataggtaaggtttcatgggagctcaggcgtcccttttcattgttttagggcaatgatcatgatatgtttaacatatatagttgctgaggtgaataggaaatgaagcgtataggagttttaacgagcggcggggattccccgggtatgaacgctgcggtgcgcgcggttgtgcggaaagctatctaccacgacgtcgaagtgtacggaatttataacggttattcaggattaatcagcggaaaaatagaaaaactggagctgggttcggtcggtgacatcatccaccgcggcggaacaaagctgtatacggccagatgtcctgaattcaaaacagttgaaggccgtgaaaaaggaatcgaaaatttaaagaaactcggcattgaaggtcttgtcgtcatcggcggagacggttcatacatgggtgcgaaaaaattaacggaacacgggtttccgtgtgtaggtgtaccgggtacgatagataatgacatcccgggaactgattttacgatcggatttgatacggcgttaaacaccgtaattgatgcgattgataaaatccgtgacaccgctacgtctcatgagcgtacatacgttattgaagtgatggggcgccatgcgggcgacattgctttatgggcaggtcttgcaggcggagcggaatcaatcttaattcctgaagcggactacgatatggaggaaattatcggccgtttgaagagagggcacgaccgcggcaaaaaacacagtatcatcatcgttgcagaaggggtaggcagcggggttgaattcggaaaacgcatcgaagaagaaacgaaccttgaaacacgggtatccgttttagggcacatccagcgcggcggatctccaagcgcttctgaccgggttcttgcaagccgcctcggcgcttacgcggttgagcttctgcttaaaggaaaaggcggacgctgcgtaggtatacaaaacaacaagcttgtagaccatgatattatagaaattttagaatcaaaacatactgttgaaccaaacatgtatcagctttcaaaagaactgtctatttaaggcggaagaagctgaagatttcagaaggaagtgaacgagttgaaaaaaacaaaaatcgtttgtacaatcggtccggccagtgaaagtgtagaaatgctgacaaaattgatggaagcgggtatgaacgttgctcgtctgaatttttcacacggtgatttcgaagagcacggcgcaagaatcaaaaacatcagagaagccagcaaaaagctcggcaaaaacgtggggattctcctcgatacgaaaggtccggaaatccgcacgcacgatatggaaaacggcgcgcttgagcttcaggcgggaaatgaaattatcgtttctacgaaacaggtgctgggaacgcttgaaaaattctcagtttcttatgaaggcctggcagacgacgtgtcagcagggtctatcatcctgctggatgacggtttaatcggattggaagtgctggaatcaaatccggaaaaacacgaaatcaaaacaaaaatcttaaacagcggcacgctgaaaaataaaaaaggcgtaaacgttcccggcgtcagcgtcaaccttcccggaattactgaaaaagacgccaaagacatcatattcggtatcgagcaaggcgttgatttcatcgctgcgtcatttgtacgccgttctacggatgtcctggaaatccgcgaactgcttgaagagcataacgcgtctgacattcaaatcattcctaagatcgagaaccaggaaggcgtggacaacctggatgcgatcctggaagtatctgacggcctaatggtagcgcgcggagacctcggcgtagagattccggccgaagaagtgccgctcgtgcaaaaagaaatgatcaaaaaatgcaacgcgctgggcaaaccggttattactgcgacacaaatgctagacagcatgcagcgcaaccctcgtccgacacgtgctgaagcaagtgacgttgccaacgccattttcgacggcacagatgcgatcatgctttccggtgagacggctgcgggacaatatcctgttgaggcggttcaaacaatgtttaacatcgccacacgcacggaagaatctctgaactataaagaaattctgtctaaacgcagagatcaggtcggcatgacgattactgatgcgatcggccaatcagttgcgcacacggcgatcaatctgagtgcggcagctatcgtgacgcctacagaaagcggccatacggcgcgtatgatcgcgaaataccgtccgcaggctccgattgtagccgttacggttaatgagtctgtatcacgcaaactcggccttgtattcggtgtattcccgtcaagcggccaaaacgcgaattctacagatgaaatgcttgaagacgcggttcaaaaatcacttgacagcggcatcgtgaaacgcggtgatctgattgtcattacagcaggttctgtcggtgaatcaggcacgacgaatctgatgaaagtccacactgtcggcagcattatcgcgaaagggcaaggcatcggacgcaaatctgcattcggtccggtcgttgttgcaaaaaatgcgaaagaagctgaacaaaaaatgacagacggcgcagtattggttgcttcaagcactgaccgcgacatgatcgcttcacttgaaaaagcatcagcgctcatcactgaagaaggcggtctgacaagccatgcagccgttgtcggtttaagcttgggcattccggttatcgtcggccttgagaacgcaacttcagttttaacagaaggacaggttatcacagttgacgctgcccgcggcgctgtgtatgaaggccgcgcaagcgttctttaaacagctttaaaaaagagaggggggttctcccttctcttttgtctttaggttgattttcctattcccatgcgggcggtgacgcgcttttagaagggcaggagggcagaaaaatgagagtgttattcttactgtttatcgtatgtccggcaattgaaatcggtttgtttctgctggcgggaaaatggctcggtatttttccgaccttccttctcatcattttgacaggcgtgttaggcgctttggtggcaaaaagacagggaaccgatgtgtatcatcgggtgatgcgcgacctgcagcacggcaaaatgccgggggaagcgcttcttgacggaatatgcgtctttttcggaggcctgcttttgatgcttccgggttttctgtccgatattgcaggggcctgtcttctgattccgttcactcggaaccgcatgaagccgtttttgttcaaatggctgagagggatgtcaaaaaacaagcggatcattatcaaataaaaaacggcagccttcttacagggctgctgtttttatttggattgaacagtaatataggcccatatttcttttagagcgcccgttgtgataaaggcctgaatgaaaacgagcagcgcgggcccggcagccagtcctaaaattccgaacaatttaaagccggcaaacagggcgattaaggtcgcaagcggatcaagtccgattgacttgcttaaaattttcggctccgtcagctggcgctgaatgagaaccacaatatataaaacaccgagaccgatcgcttgaggaagctgaccggcaatggccaaatacataatccagggaacaaagaccgacccggcgccgagatacgggagcagatcaaccaggccgataaaaaaggcgatggttgccgcatgctcaatccctaaaagaaaaagtccgataaagacaatgatcatcgtgaaaagtatgagcacggcctgcgccttaatgaaacctgccatcgcttttttcagctctcccgatacggccttggcgtttgccgaaacccgttccggaaaaatggaataaagcagcgccttcagcttatgccagtcctttgtcataaaaaaagtcgccagcattgcgaaaatgaagacggcagctgtattgggaaggaaggcaatccatttcggcaccagctccaaaagatgtgaaagcatgagccccgcatttttagcggctgtatcaccgagggtctgaatatgcgtcacgatggaagcctgctgattggtttccagcccgttaaataggacggtcagctcgtggtacaatggctgaatgcgggaagtgaacagctcttcgcaatacgtcataaaggcgctgatatggggagggagcgttttggccagataggcggttcccgaaatgatttccgcaacgagaaatgttgccgcgccgagaagaataagcaaaaagaagaccaggacaatgactgtattgactgaccggggcagccccgtcagtttgtccagccagtcaacaacgggaatgatcgctgatgacagaataagggcgatcagaaacggataagttaacggaaatgaggcgtaaccggccgctaaagcgccgccggccgcagcgagtacaaacagcgcgcggaaaaaaacagttgcatagtgcggattcacatcgatcctcctctcggtcggcacgtcctattacattagtttattcgtcaaaaaaaaggatatgattacagatatgatgaaagagggtgctttcaggatgtttacacaggcgaatttatttttactattattgctggccatcgcattggtagccaaaaatcagtcattgctttttgccgtcggctttctcattgtgataaaagctgtcggtcttgatcagaaactatttccggttattcagtcaaaaggcatcaactggggggtcaccgtcattacaatcgccgttttagtgccgattgccacaggtgatatcggttttaaacagctcggagaagcgatgaaatcatattatgcgtggatcgctctcggtgccgggatcgcggttgccttaatcgccaaaaacggtctcaccttattggaaaacgaccctcatattacaacggcgctggtcatcggcacgatacttgccgtcgcgcttttcggaggcgtcgccgtcggcccgttaatcggcgccggaatcgcctacttggccatgcaaatcgttaaaatattcacttcataaagtaaaaaagcggcgtaaagctgcttttttttgcgggtgaaaataagagtttgcagggcattttgtagttcagacaaatgccatttgcattattccgaggaatgaagtggcttaccatgtaacaaagaacttcggaatcgccggcgcatattgtgcgatgacagcggatgcagtaaggcggttccaattgatgaatggattaaaagctgatggaatttatgcacttgaaccaaatcaaaacttgaagtgttgttaaaataagcggagaccctttccttcaatttgaaagtttgttaaatttataatgagaatgaaaaaacacaattcggttggtagtccggatgcattatttaaaatgtcagtaaccttcccctcctcgggatgtccatcattcttcagtaaatttaggaggagggaatcgttatgaaattaacggtttactacgatggtcagttttgggtaggagtcattgaagttgtgaatgatgggaaattaagagcagttcgtcatttgtttggaaaagagcccaaggattcagaaatcatgcattttgttcataatcaacttttacagactctctcccgcactgaacaaacaggggtttgtgttaaagcaaaatctaagaagttaaacccaaaaagattacaacggcaagcttctaaagagatgaaaaatatcgggatatcaactaaggcgcaaaaagcgataaaacaggagcttgaagcaagaaaagaaaagaaaaaacaactgaacagaaaacaaagagaaaaaataaaggaacaaaaatatttaatcagaaaacaaaaagcaaaagaaaagcataggggcaaatagttggagaacccgaagcccttcgattaaaaagttgagcggcatcagttttttcttcggactgatttagaaaaaagaagcagaaatcgagcccttctcgagatgaggagggtttttctgcatttatttaacttcacctacatcagtaaatgagtcagtttcaattgatgaacggtttgatgaggatatttacgggccgacaacagcgcaaatgcagtcaaacgattccagtccatgtacggggagccaactaaaaccaagacatggatttccgaagctgatccgaacattgattcagtcgagtaaacaaaatccccccttctccggtaaagaaggagggatttgcggtgaagttgttgcgcctgtccttttaaagtttccccaaagctccccccaaatgaaaacatgagaatacatggttttacaaagcatctgaaagcaagcgattaaatttatcaacgccaagccttgatatatagggcttttaaaacatttttagttaaaagtctacaaattaatcagattattgtttataataagaataggcttaaacttaaataagcttataagaatttgttatgttcctctataagcataccggttatgtaaccgcaaccagtgaaatgtaagcattttcttaaaggggaaagggattgtttgcatgactcattttaagtaagccgtatgttttatatactctttaaaggggaattttgattgaaaaggagaggttgaatatgacagcaacacgcggtcttgaaggggttgtagcaacaacatcatctgtaagctctattatcgacgatacccttacatatgtagggtacgatattgacgacttgacagagaatgcaagttttgaagaaatcatttatttgctgtggcatctgcgcctgccgaataaaacggaacttgctgaactgaaaaaacagcttgcgaaagaagctgccgttccacaagaaatcattgagcacttcaaatcctatcccctcaataacgtacatccaatggctgcgctccggacggcgatttcattactcggtctgactgacagtgaagccgatgtcatgaatccggaagcgaactacagaaaagccatccgtctgcaggcgaaagtgccgggcattgtcgccgctttctcaagaatccgcaaaggacttgatcctgttgaaccgaaggaagagtacggaatcgcggagaacttcctttacaccttaaacggtgaagagccttctccgatcgaagtggaagcgtttaacaaagcgctcattcttcatgcggatcatgagctgaatgcatcaacatttacggcgagagtatgtgtcgccaccttatctgatatttactcaggcatcactgccgcaatcggcgctttaaaaggaccgcttcacggcggagccaatgaagccgtcatgaaaatgctgacagaaatcggcgaagtggaaaacgccgagccttatatccgcagcaaaatggagaaaaaggaaaaagtaatgggcttcggacaccgtgtgtataagcatggagacccgcgcgccaaacacttaaaagaaatgagcaaacgcctgacgaatctgacgggtgaaagcaaatggtacgagatgtcaatccgtgtcgaagaaatcgtgacgtcggagaaaaaacttccgcctaacgttgatttctattccgcatctgtctaccacagtctcggcattgatcacgatctgttcacgccgatctttgcggtcagcagaatgtcaggatggatcgcccatattcttgaacaatacgataacaaccgcctcatccgcccgcgcgctgattacacgggtccggataagcagacttttgttccgcttgatgaaagagcctgatcaaacgggaggctggtgattttcatgtcgttagcctcttgttaatcaagcccggattggtttacaattttgatagaatcttgagaaaagtcattttattttttatacaagaaaaataaaatgttttctaaatatgaattacatactgggaggtaatattgtgtcacaaggtgaaaaaattacagtctctaatggagtattaaacgtaccaaataatccgattatcccgtttattgaaggcgacggcacaggccctgatatttggaatgccgcttctaaagtattggaagccgctgttgaaaaagcatataaaggcgagaaaaaaatcacgtggaaagaagtttatgccggtgaaaaggcttataataaaacaggtgagtggcttcctgccgaaacactggaagacatcagagagtacttcatcgccatcaaaggtcctctgacgacgccggtcggcggcggtatccgttctctgaacgtggcgctgagacaggagcttgatttgtttacgtgcctgcgccctgtcagatatttcacgggagtgccttctccggtcaaacgtcctgaagatacggatatggtcattttccgcgagaatacggaagatatttacgccggaattgagtatgcgaaaggttctgaagaagttgaaaagctgatcagcttcctgcaaaatgaaatgggcgttaacaaaatccgtttccctgaaacgtcaggaatcgggatcaagcctgtttctgaagaaggcacaagccgcttagtcagagctgccattgagtatgcgatcgaaaacggccgtaagtctgtcacgcttgtccacaaaggaaacattatgaagttcactgaaggggcatttaaaaactggggctacgagcttgccgaaagagaatacggagataaagtattcacttgggctgaatatgaccgcattgtcgaaaaagacggaaaagaagcggctgataaagcgcagagcgaagcggaagcggcaggaaaaatcatcgtcaaagacagcatcgctgatattttccttcagcagatcttgacccgtccgagcgaattcgacgtcgtggcgacaatgaacttaaacggagactatatctctgatgcgcttgccgctcaggtaggcggaatcggaatcgcgccgggagcgaacatcaactatgaaacagggcatgcgattttcgaagcgactcacggaacggctcctaaatatgccggccttgacaaggtcaacccgtcatccgtcatcctttcaggagtgcttcttcttgaacacctgaactggaatgaggctgctgacttgatcattaaatctatggaaaaaacgattgcttcaaaagtagtaacgtacgattttgctagattaatggacggtgcaactgaagtgaaatgttcagagttcggtgaagagctcatcaaaaacatggactgaacctaaagcagacttctaatgaagccaaaaaaggagaagagaatcatgggaaaaacacgcagtaaagtttctgttatcggagcaggatttacgggagcgacaacagcctttcttacagctcaaaaagagcttgcggacgttgtgctcgttgatattccgcaattagaaaacccgacaaaaggaaaagcgctagacatgctcgaagcaagtccggttcaaggatttgacgcgaaaatcacaggcacgtccaactacgaggacacagccggttctgatatcgtcgtcatcacagccggaattgcgagaaaaccaggcatgagccgtgatgatctcgtatctacaaacgaaaaaatcatgagaagcgtcacacgtgagatcgtgaaatattctcctgactgcattatcgttgtattgacaaaccctgttgatgcgatgacatatgcggtgtacaaagaatcaggcttcccgaaagaacgcgtcatcggacaatccggagtgcttgacactgcgcgattcagaacattcgtcgctgaagaattaaacctgtctgtaaaagatgtgaccggttttgttcttggcggacacggtgacgacatggttcctctcgtccgttattcctatgcgggcggcattccgcttgaaacgcttatcccgaaagaccgtcttgatgcgattgtagaacgcacaagaaaaggcggcggggaaatcgtcaaccttctcggaaacggaagcgcctactacgcgcctgctgcatcactgactgaaatggtagaagccattttgaaagatcagcgccgcgtgcttccgaccatcgcttacttagaaggcgaatacggtcatgaaggcatttacttaggcgtaccgacgattatcggaggaaacggcctggagcaaatcatcgagcttgaactgacagactatgaaaaagcgcagctgagtaaatcagttgaatctgtcaaaaacgtgatgaaagtattgtcataagaaaaaagggaaggcttccgaatcagaagccttcctctttttacaattaatgaaagcgttttctttttccctgagcgatcctttctctgaaaatgatcaaaaaggcgaattgtctgaacgggcagtattggataaaatgaaatcataaagtgatatgcagcacataaaatagagaaaattggatgtcggggaaaatagacagcggagggcgcagcatgaacaaaaaaattttagttgtagatgatgaacaatctatcgttactcttttacagtataatctggaacggtccggctatgatgtcataaccgcatcagacggcgaagaggctctggagctggcagagaatgaaaatccggatttaatcgtactggatgtcatgctgccgaaagtggacggaatcgacgtctgtaaacagctcagacagcagaaaatgatggttccgatcttgatgctgacagcaaaagatgaggaatttgataaggtgctgggactggagctcggagcggatgattacatgacaaagccgttcagtccgcgggaagtcactgcgcgggtgaaagccattttaagaagggctgacatttcttcgctgtcacaaggcagagaagaggaaaaggacgggcagatcctcatcggcgagctgaaaattcttccggagcattacgaagcgtacttcaagtcagaacagctggaattgacgcctaaagaatttgaactgcttctgtatttgggaaaacacaagggaagagtgctgacgagagatcttctgctgagcgcggtctggaactatgattttgccggggatacccggattgttgacgttcatatcagccatctgcgcgacaaaatcgaatcaaataccaaaaaacccatctatattaaaacaatcagaggtttggggtataaactggaggagccaaaaatgaatgaataaagtccgtgtgcgtctgttcgctttactcgttgtatgtatcatattggttttcagtgttctcggcctttttttacagcagcttatttcttcatccgctgaagaaagaacggcggatcagctgaaaaaggaatcggtatacatagcgggccttcttgacaccggccgaatcggcaataaaagcaatgaaacggtaatccgtgacgccggccgcaccctcggtataaacgtctccttgctcaacgagaagggtgacgccgtatatcattccggcagtcgtgctgatgattcagccgtaaaggagttcatttctcacaataaaagcgaggaagccgtacagtcgaaaagcagagtcatccgcggcactgccgtaaaaaatgacgcagggaaaattgcggggtatgtactcgtttcctcggatatcaacggcggttcaagcgttaccggagaaatgtggggcatgctggcagcaagtctttgtaccgcttttatcattatcgttttcttttatacaaacatgacgtcgcgttacaaaaaatcaatcgacgccgcgacaaaggtggcgacggagctgtccaaagggaattacgacgcccgctcctacagcggttacgcaaggcggtcggaccgtctcgggcgtgcgatgaacagcctggcggtcgatttaatggaaatgacaagaacgcaggatatgcagcgcgatcgtctgttaaccgtcattgaaaatatcggatccggtttgattttaatagacgggagaggttttatcaatctcgtgaaccggtcatacacgaagcagtttcatacaaagcctgaacgtctgcttcggcgcctttaccacgatgcgtttgaacatgaggagatcattcggcttgtcgaagacatttttatgacggagacgaaaaaatgccagctgctcagacttcccatcaacattgagcggcgctactttgaagttgacggcgttccgatcatgggccctgatgatgaatggaagggcatcgtcctcgtttttcacgatatgacggaaattaaaaaattggagcagatgagaaaggacttcgtcgccaatgtctcccatgaactgaaaacaccgatcacctcgattaaaggatttacggaaacactgttagacggagcgatgaaagacgaaaaggcgctttcagactttctgtctatcattctgaaagaaagtgagcggctccaatctctcgtgcaggatttattggatttatccaagatggagcagcaaaactttacgatgcgcgtagagtcctttgatgctgcaaaaattctgcatgaaattgaggcgcttttgcagcataaggctgaggaaaaaggcatcagctttcagctcgatctcccggaagagccgatttttgtgacgggtgatgcgcacaggctgaagcaggtatttttgaatctggcgaacaatgccctgacctacacgcctgaaaaagggacggtggggatttcggtacatgtgaaagaaaccgttgtcgatatcaaagtgtccgatacgggaatcggcattcagaaagaagagatcccgcggatatttgagagattctaccgcgtggataaagacagaagccgcaactcgggaggaaccggcctcggcctcgccattgtgaagcacttaatagaagcccatgaaggtaaaatcgaggtcacaagcgagcctggacagggaactgtgttcactgtgacgctgaagcggccgccggcagcgtgatcagctttacaaaggattaacaatttcttcatgacctgttaaacctatcttgttaggatataacagaaccccttcatccaaggagccaattttgacggcgggaacgcgttttcttgttcccgtccttttttgcgttttcacggggtccgctcattttcctttcaaattgaactttgttaaaataagagaagctgtgagattaaaaaacagaggaatgacgagcttttgctcttaggaggatattgaatgacggaacgaaaaaaattagtgcttgtcgacggaaacagtctggcgtaccgggcgttttttgcattgccgcttttaagcaatgaaaaaggcattcatacaaatgccgtatacgggtttgcgatgattttaatgaaaatgctggaagatgaaaaaccgacccatatgctggtggcttttgatgcgggaaaaaccactttccgccacagcacgtttaaagaatataaaggcggaagacaaaaaacgccgccggagctttcagaacagatgccgttcatccgcgagctcctcgatgcctacaacatcagccgctacgagcttcctgaatatgaagcggacgatattatcggcacgcttgccgtatctgctgaaaaagacggctttgaagtgaaggtcgtttcgggggacaaggacttaacccagcttgcaaccgggaaaacgaccgttgccattacgagaaaaggcattaccgacgtagaagattacacgccggagcacgtgcgggaaaagtacggtctgactcctttgcaaatcattgatatgaagggattaatgggagattcatccgataacataccgggcgtccccggcgtcggagaaaaaaccgcgattaagctcttaaagcagttccattcggttgagaaactgcttgattccattgatgaagtcagcggaaaaaaattaaaagaaaagcttgaagaatataaggaacaagccctgatgagcaaagagctggcgacgattatgacaaatgcgccgattgaagtcaagcccgaagatttagattaccaagggtttgaccgtgaacaagttgttgccatttttaaagacctcggttttaatacgcttcttgagcggctcggtgaagaaagcggggaaacggcggaagaaaattttgaagacatcaatgtcgaaacagcagaagaaatcaccgaagatatgctcgtttcgccgtccgctttggtcgtcgaacaaatcggtgataactatcacgaagaaccgatcctcggcttttccatcgtgaatgaaacaggtctttattatattccgaaagaaatcgccattcagtctgaagcttttaaatcttgggctgaagatgaatcgatgaaaaagtgggtgttcgacagcaaacgttccgtcgtcgctttgcgctggcagggaattgagctgaagggaacggaatttgacgcgcttcttgctgcctacattataaacccgggcaattcgtacgacgatgtcgcgagcgtagcgaaagaatacgggctgaatatcgtttcaaaagatgaagcggtatacggaaaaggcgcaaaacgcgccgttcccgctgaaaaagagcttgccgatcatctcgcgcggaaagcgtctgccgttaacagcctccgtgacaaactgcttgacgctttggaagaaaataatcagcttgagctttatgaagatcttgaactcccgcttgcgctaattctcggagaaatggaatcaatgggcgtcaaagtggatgtggaaagactgaagcgaatgggagaagagctcaaggcaaaactgaaagaatatgaagaaaaaatccatgacatcgccggtgagccgtttaacatcaattcaccaaaacagctcggcgtcattctgtttgaaaaactcggcctgccgccagtaaagaaaacaaaaacaggctattccacttcagctgatgtgcttgagaagctcgcagacaaacatgatatcgtcgcgtacattctgcaatacagacaaatcggcaaactccaatcgacttatattgaagggctgctgaaagtcacgcgcaagggttctcataaggtgcatacacgattcaatcaggcattgactcaaaccggacgcctcagctcaacggatccgaacctgcagaatattccgatccggctggaggaagggcggaaaatccgtcaggctttcgtaccgtccgaaccggactggcttattttcgccgccgattattcacaaattgaattaagggtgcttgcgcatatttcaaaagatgaaaatctgatcgaagcgtttacgaatgatatggacattcacacaaaaaccgccatggacgtgtttcatgtcagtgaagatgaagtgacacaagcgatgcgccgccaggcaaaggccgtcaatttcggcatcgtttacggcatcagtgattacgggctgtcgcaaaacctcggcatcacccggaaagaagcgggcgcttttattgaccgctatttggagagcttcccgggcgtcaaggcgtatatggaagaatcggtgcaggaagcgaaacaaaaaggatatgtgacgacacttatgcagcgccgccgctatatccctgagctgaccagccgcaacttcaacctgcggagctttgcggaacggacggccatgaatacgccgattcagggaagcgccgccgatattattaaaaaagccatgattgacatggcagctgagctgaaagaaaaaaacctgaaggcgcgactgttgcttcaggtgcacgatgaattaatttttgaagcgcctaaggaagaaattgaaatattagagaagctggttcctgaagtgatggagcatgctttggcattagacgtgccgctgaaggcggattatgcttcagggccgtcttggtacgatgcaaaataaacagaaaaaaaggaagtgatgattgtgccggaattaccagaagttgaaacggtccggcgcactctgaccggtcttgtgaaggggaaaacgattgaatcggcggatatcagatggccgaatatcatcaaaaaacccgccgagccggaggaattcgcgcggcagattgcaggagaaacgatccgatccatcggaagaaggggaaagtttttgcttttccatttggatcattatgtcatggtgtcacacctgcgtatggaggggaaatacggtcttcatcaggccgatgagcctgacgataaacatgtgcacgtcgtgtttcacatgacggacggaacacagctccgctaccgggatgtccggaaattcggcacgatgcatttgtttgcgccgggagaggaacggaatgcattaccgctttcacagctcgggcccgaacccgatgatgaagcatttaccgccgcttatttaaaagagcggcttgcaaaaacgaaccgcgcggtaaaaaccgccctgctcgaccaaaaagcggtcgtcggcctcggcaatatttatgtcgatgaagctttattccgggcgcgtattcatcctgaaacaaaagcgaacagtctgtcggacgggcagataaaaacgcttcatacagaaattaaagacacccttcaggaagcgattgacgcgggcgggagcaccgtccggtcttatatcaattctcaaggggagatcggaatgtttcagctcaaacattacgtctacggcaaaaaggatgaaccgtgcaaaacgtgcggcacgatgatttctaaaatcgtggtcggcgggaggggcactcatttttgcgcccgctgccaaaaaaaatcataaactgaagctgttcaagcaggcggcagcagaatgacttttttctaacacagttgatgacctttctccatatatatattgtgattcacccaataggcatatgtcacaattgccgatcaagagaaagggagaaacggatatggagattgtttctttgctgcttttggcttttgctgtcagcttggacagtttttcagtcgggtttacgtacggtttgagaaaaatgaaaatcccgttcaaagcgattgccgtgatcgcctgctgttcagcctctgtgatgtttatatccatgctgatcggccattttctgacaaagatttttcctgtatccgtcacggagaaactgggcgggctgatcttaatcggaataggggcatgggtcatctggcaattttttaaaccggctaaagagccggattacttattgcatgaaaaaacgctgcttaatcttgaagtgaaatcgctcggcatcgtcattcatattttgaaaaaaccgaccagcgccgatattgatcaatccggaaccattaacggagtcgaggcgcttctgctcggtatcgccttatccattgacgcgtttggcgccgggctgggagcggccattctcggcttttctccggttatgatgagcgtgactgtcggggtgatgagctcgctgtttgtttcactcggcataaacgcggggcatttgctttcaaggtggaattggatagataaaatgacatttttgccgggagtcctgctgattatcatcgggatttggaaaatgtaagaaggagtgggctttttgagcttggtcatcggtttaacgggaggcatcgcaagcggcaaaagcacggtagcgcgtatgctgatcgacaaaaaaataacagtcattgatgcggatgtcatcgcgaaacaggcggtggaaaaaggaatgccggcttacggacaaattgtggaagcattcggaaaagacatcctgctggaaaatggcgatattgacagaaaaaaactcggttctatcgttttcactgacgaacagaagcgtctgaagctgaatcagatcgttcatccggcagtgcgtgcggaaatgctgaaacagcgggatgaagccattgcgagaaaagagcagttcgtcgttttggatataccgcttttgtatgaaagcgggcttgattatcttgtcggcaaagtgctcgtcgtcaccgtaccggcagacattcagctcaaacggctgatggagcggaattccctgacagaagaagaagcgatgagccggataacgtcgcaaatgcctttagcggacaaagcaaaaaaagctgacgccgtcattgataacagcggcagtcttgaatatacaaagcaccagcttgaggaagtattgagcggctgggcataaacaaacaccgttcggaaagccgaacggtgtttttctggttaaaaatcaaaattgtcagggtccggaccgacacggagattttcgttcagatcatcaatccgcttcatatcttcagctgacagttcgaaatcaaagacatttgcattttcttcaatacggtgttttttagttgatttcggaatggtgatgacaccgttttgcaaatcccagcgcaaaatcacttgagcggctgatttgccgtatttctcagcaatctcctgtaatacggggtgatcaagcagctgcccttgcatcaatggcgaccacgcttcaagctgaatgccttgttcagtgcagaaagcaagcagttctttctgtgtcaggcgcgggtggtactccacctggttgatcatcggcttgatttccgtttctttcatgagatgtttcaggtggtgaatttggaaattgctgaccccgatcgccttaatgcgtccatcccggtagagggtttcgagcgcccgccacgcatcgatgtactttccttcgacaggccaatggatcaaatataaatctaaataatctaaaccgagtttttctaagcttgtgtcaaacgcttttaacgtttcttcatatcctaaatcggcattccatacttttgacgtgacaaaaatgtcttcacgttttaatcccgcttcttgcagcccttggcggatcccttcgccgacaccttcttcatttccgtaaatcgcggcggtatcaacgctgcgatagccgtgcaccaatgccgttttcaccgcgttgacgagttccgcgccttcctctactttgaaaactccgatgccgaaccaaggcatctctactccgttatgcaatgttgcttttgcttgtaaatgtgttgtcatgtatatattcctcctattatttgtctgtcgaaaaaaatcaaaatgcgctgaagaaaaactcacctcctttcaagggcagtgcgatcccgcttttccagcttcctgctccatccggttaatacgaccgcgctgagcaccatcagcgccccgatccaagcggtatgaatgattccgattgagtctgtaatgattccgccggcaaacgagccgatcgcgattccggcattaaatgccgcgatatttaaggctgatgctgtatcaacggcgcttggcgcaaaacgttcactcagcatcacgacatatacctgaagccccggcacattcataaacgccaacagccccatgaaaataatggtgatcagcccggctgttttaaacggcgcggtaaaagtcaggacaaacagcacagctgcctggacaatgaacatataaaacaaggctttcagcggattccggtttgataaacggccgccaatcatgtttccgatggcaatcgcaattccgtaaatgagcaggatggccgcgacggtttctttctgaaaacccgttacctcctgaagaagcggagataaatacgtaaacacgacaaacgttccgccgtagcctaacgctgtaataataaataaaagcaataaccggccgtttgtgacgagtttgacctgctcggaaaatgcggttttcgtccctttgcgcaaatgagacggaacgagaagcgcgtttgtgaggaatgcgatgattcctaccgccacaatcacggcaaatgcgattctccatccgaattgctggccgagataggtgccgaacggaacgccggtcaccgtagccaccgtcagccccgtgaacataatggaaatcgcgcttgctcttttatgctccggcacgatattggcggcgatcgttgccccgattgacatgaaaatgccgtgggaaaaagccgaaatgacccgtgccgccagtaagacgccgattgaggaagcgctcgctgcgagtgtatttccggcgataaaaatcaacatcacccagagcagcagtgttttccgcgacatgccggatgtgagagacgttaaaaccggcgcgccgaatgtcacgcccagagcatacatggaaacggtaagtcccgccgttgtcacaggtatatgcagatcttgagatataagcggcagcagtccgacgctgataaattcggttgtgccgatcgcaaaagcgctgacggctaatgccagcagcgctggtaaatagctttggcgatgtgaagacatctgttttcctccttaaacgataatgtatggttgaaatgatgccgggtaaacgatataagtataagagtacattccttttcagccggcaaatgtcattatgattgatagaagtgtcattgaaaagaacgtacttttaagtgccataggcactttttagttcctatagatgaggaggaattaccgttgctgaagaaaaaatacaatatatccgtagaggcggcgcttgaagtgatcggcggaaaatggaagtgtgtgatcctctgccacctcatgcgcgggaaaaaacggacaagcgaattgaagcggcttatgccggacatcacccagaagatgctgacacagcaattgcgggagctggaagctgacggcgtcatcaaccggatcgtgtacaatcaggtgccgccgaaagtggaatacgagctgagtgaatacgggcacagtctggaaagaattttaaatgcgctgtgtgactggggcgcgatgcatattgctaaacggtacggcgaggtgtcttccgttttagaggacagcattttgaatgacaaatttaaagaaccgggacaaatataagaaaaaagcaggcagcctgagacgctgatcctgctttttttatggaagaaaaatcattttatatgcaaaaaaaccgattgaacaacatattgatcggtataagggtggatttttatcaagttgtactggcggatttcttttaatgtgttatactatatataaataaaggtaaattagagtggcatattaaaaaggggtgacctgagcatgaaggtaaaagtagcaataaacgggtttggaagaatcggaagaatggtgttcagaaaagcaatggaagatgatcaaattcaaataacagccattaatgcaagctatcccccggaaacgcttgctcatttgataaagtatgacacaattcacggcaaataccatcaagaagttgagaccgccgacgacagcctgatcgtcaacggaaaacatattatgctgttcaatcgccgggacccgagagagcttccgtggaaagaatgcggaatagacatcgtcgtagaggcaacggggaaatttaattcaaaagaaaaagcgatgagccatattgaagcaggggcgaaaaaagtcattttaacggctccgggcaaaaatgaagacgttaccattgtcatgggagtaaatgaagagcagttcaatcccgatgaacatgtcattatttcaaatgcatcctgcacgacaaactgtcttgcgccggtcgtcaaagtgcttgatcaggaattcgggattgaaagcgggctgatgacgactgttcacgcttacacgaatgatcaaaaaaatatcgacaatccgcataaagatctgcggagggcgagagcgtgcggagaatccatcattccgacttctacaggcgccgctaaagcgctgtcgctcgtgctgcctcatttgaaaggaaaacttcacggtctcgctttgcgtgttcccgttccgaatgtgtcattagtggaccttgtctgcgatctgaaaacagatgtgtcggccgagcaagtgaacgccgctttccaaagagcctcaaaaacgtcgatgtacggaattcttgattattcggatgagccgctcgtttcttcggattataatacgaattcacactctgcgatcatcgacggactgacaacgatggtgatggaagaccgaaaagtaaaggtgctcgcctggtatgacaatgaatggggatattcctgccgggtcgttgatcttatccgtcacgtcgccgcgcgaatgaaacacccgtcagctgtgtagactaaagatcatggacatttgttagaaaaaaacccttaacggcatattcgcaaaaaacacaccttgcaaaataaacttaaacacagtatactatctttcgtgaacttcttgctcgtgactgcttcggaattacttaaagggttaggacctctccggactaactttcccccgtggtaaatggccgggtcagttctcggaaattcacttttttaattcttgttaaggggggtccatgattatggaaacaatggggcgtcacgtcatctccgagctgtggggatgcgattttgataagctcaatgacatggattttattgaaaaaacgtttgtaaatgctgctttgaaatcaggagctgaagtgcgcgaggtcgcatttcacaaatttgcaccgcaaggcgtaagcggagtcgttattatctctgagtcacatttaacgattcacagttttcctgaacacggatatgcaagcattgatgtttatacttgtggagacctggatcctaatgtggctgcggattacattgcggacgcattacatgcagatacaagagaaaacattgaaataccgagaggaatggggcctgtacagattaaacaggcacaagcgaaagtactgtaattttcaaaacgcaaacacaagggagctaagctgaaaaagccattacgcgctttgaagctgatgctccttttctaatgtaaaaaaacagcattgctttttctttaagcattttttttgtaaaatagaaaagataaggccggtctatcggctctcccaacaaataggctcatcctagaaacgttggcgggcatttaccggaagcttgcgaaccgcattacagcaacgaaacagatgggagctgatccaatttgaaatgtccttcatgccagcataacggttcccgcgtacttgattcacggcctgcggacgaagggaaatcaatccgcagaaggcgggaatgcgaagcctgccattaccgcttcactacatttgagaagtttgaagagatgcctctgatcgtcgtgaaaaaagaaggcgtccgggaagaattcagccgtgaaaaaatgctgcgcgggttaattaaagcttgtgaaaaaaggcccgttcctttgaaaacattggaagacatgtgctttgacattgaaaaagagctgagaaaccaaggcgtatctgaagtcaaaagcgaacttgtcggtgaaatggtaatggaccgcctggcgaaaatcgatgaggtgtcttatgtccgctttgcctccgtctaccggcagtttaaggatataaacgtgtttatcgatgaattgaaagatttaataaagaaagaacgctgagagagctaagagattgtgtctggctcttttctcatgagcaaaattggcatttgatagatcgcagaaacggtgtaaaatgagagtagaaacatatcggaaggtttgagaatcatggctgactattggaatgacgtattgcctgtagatccttatacggtcaaaagccgttcgcttcttcaggatgtcgacagacaggttttgacacatctgtaccagccgctgatcggttcttttgcattctccctttatatgaccttatggggggagcttgagcagaaccgcttgtggggagcggaatccacgcacaggcagctgatgggcatgatgcagtcaaatttaaaaaagattcatcatgaacagggaaagcttgaaggaatcggactgctgaaagtgtatatccgggagtccgagcaaaaagagcggatgtttatttatgagctgctgcccccgctcaggccgaatgatttttttgaagacggcatgctgaatgtctttctttataacagagtcggtaaaacgaaataccagcagctgagacaattttacacgcacccttccgtcggcgcgggcgcaagggaaattacccgtccgtttaatcacgcttttgcctcttttcagccgagtgaatggaaaatgacgcctgatatggaagaggcgatgaagctccccgaggactatgagacggcgtctgtcggacaagcgccttcctatacggtgacggaggaagtgtttgattttgagctgtttttggcggggttatcagaaacgatgataccgcgcaaatcaatcacacaggatgtgcgggagagcattaaaaagctttcatatttatacggaatagatcctatctccatgcagcacgtcgtcatgaccgcaattaatgagcaggatacgataacggccgaagcgctgaggaaagcggccagcgactggtaccaaattgaaagaagcggcaagcttcccgaactgattgataaaacacagcctgtcaccttgagagaaaaccggacggaaaaggacgattcattgaacggcgaactcatcgcacagcttgagaccatatcaccgagaaagcttctccaggacattgcggacgggaccgagccgtcaaaagccgacctgcagattatcgccgatattatgttcgaacaaaagcttgagcccggcgtcaccaatgtgctgatttattatgtcatgctgaaaacggatatgaagctgtccaaaaactatatccaaaaaatcgccgcccactgggccagaaagaaagtcaaaacggtacgggaagcaatgaagctcgcaatcgaagagcacaggcaatatcttgattgggcggacggcaaaacaaacggcgcggcgcgcggcaaaaaaaccgtccgggaagaaaagcgccctgattggatgaaagaagaagaaaccgggaagaaacaagaacagacggctctttccgcacaggatcttgaagaacagaagaaaaaaatgatggaagaaatgaaaaaactgaaaaaatactctgcctattgagacagagaagcggggtgatattgaatggaaccgatcagccgatccttagaaggcgtgacgaaaagacctgactttcaaaaacgcctggaacgaatgcagcagcaagttatggccgacgaagacgtccaggcttttttgaaggaacagaaagatgttatcaatcaaagcatgattgacagagggttaaataaactgtacgaattcgttcagcaaagtaaacagtgcgccttctgttcgaaagacagccggacgaacagcctgcttgaaggctaccatccgaagcttgtgatcaacgggcgttccattgatattgaatattacgaatgtccggaaaagagaaagctcgaccgccagaaaaggcaaaagtccctgatgaagagcatgtatatccagcaggatcttctcggcgcgacgtttcagcagatcgacattaccgatccgagcagactcggcattttccagcatgtgacggattttctgaagagctataatgaaacgggaaaaggcaaagggctgtatctgtacggaaaattcggaatcggaaagacatttattttagccgccattgccaatgaactggcggaaaaagagtattcatcaatgatcgtatatgttcccgaatttgtcagagagctgaaaaactcgcttcaggatcagtcgctggaggcgaaactgaatatggtgaaaacgacgcccgtactgatgcttgatgacatcggagcggagtcaatgacaagctgggtcagggatgaagtcatcggcaccgtgcttcagcacagaatgagccagcagcttcccactttcttctcgtctaatttttcaccagacgagctgaagcatcattttacgtattcacagcggggagaaaaggaagaagtaaaagcggcaagactgatggagcggattttatatttggcttcgcccgtccgtcttgacggggaaaaccgccgccgttcatgatgccggcgtccaatgggaaggatttgagggaatgaggaataagaaggctgtcacttgggctgcggctgcggcgggagcgggtcttttgctgtgggcaaaccgcaaatatctgaatctgtcgcctaaggagatccggctgtgggtgttatcgttcggtgtttttgcgccgcttgtgtttatcggaatttccatcgtcaggccttttgtgctgtttcccgtatcaatcgtttccgtcgccggaggattggcgttcggcccgtttttcggcaccatgtatacgctggcgggctcaatgggcgctgccgccgcgtctttttttgcggcggggctgtttgcctttaatgagaaaagccgtcatggaaaaatggaagccattcaaaagcagatgaaaaccaatggcttcttttatatttttatcctgcgcattctgcctgttaactttgatgtgatcagctatgccgcgggcctatcgaaagtcaggccggtaacgtattttttggcgaccgcagcgggcatcattccggggacgatcgtcctgaatgtgctcggcgcgagctttatgtccggcaatgtgctggccgtactctgcgtgatctgtctttacgtcgtatttttatcgcttcccgttatatttaaaaagaaggtgcgtcatttgttcggcggtgaaagctaacctttacgtctattttaaaaacatcccccatatacttgtaacagatgccgtaaggggggacaaatatgcttgaagtgatctttgaagatgaccacgataccgccgcttttttacatctcattcagcaatcggacgaccggagacattttattgtccgtgaaggcataaaaaaagtcggaatcgcaaggtctgaaacggctttttgcgttcagcgctttattgagccgatacttgtcaggttttttttggaatgcaaagaagacgagcatatgctttcgcttattgaggacgcatactgcttcaccgatcaggatgaacagcagcaaatccttcagcttgcacacagcattatggaaggagagcttgaggatcatccgtttgagccgaagaaagagccgcgcacacagtttatttcagatgcgctccgaacgatttcacttgatgcgggtgttttttccgtgcgttcgtttcagacgttccggctcggcaggtattatgagaggctcagagaatatacggaggccgcgatagatgaataccggatggaacaggaatatcaaaactttatccagtctctgagagattatgtgacatccaatccgccgcggatgaagaaagtccgcatcgtacatgaccgggcttttacgctgtgggagctgcgctatgtgtctgaacgggaacagaaaaaatacatagacagacggtttgtgcgggagcacccgatgtatatagattcccatctccttgcgccgctgatctccattgcgcctgagacggtcgaactgtatacggacaaaccggaacatatgatgtcaagaaccattcaaaacgtgtttcaggagagggtgcgcctttttccgctgggcgcgtttgcagccgagaagacggaaggatagccgcacggacggccttgtgtaagcggcagggctgtctgtgcgaaatcagacggaaaaccgagttgcatttttctcacagacattttataatacataaaagattaatgattgctacacgtattgataaggacatgaagcattgataccggctgtataagagaggagagcccaggctgaaagctttccagctatggatcattgtctttaccgcctttgaacttcagctgtgaacgccggaataagcgccagtaatagctgacgggaactcccgttacagagcttagagccgcagtgccgaagcaatcggccgcgcggaaaaaagggtggaaccacgattccgtttatttaacctcgtccctttcatagggggcggggtttttgatttgcataaaaaaaggagtgacgaagatgtcagatatgatcaacatcacatttccggacggagcggtaaaggaatttccgaaaggaactacaacagaagatatcgcggcatccatcagtccgggattaaagaaaaagtctttagccggaaaactgaacggacaggaaattgatttaagaacgccgattcaagaggacggtgccgtagaaatcattacagaaggcacagaagaaggtttgaacatcatgcggcacagcacggcgcatttattggcccaggcgattaaacgcatttataaagatgtgaaattcggagtcggccccgtcattgaaaacgggttctattatgacgttgaaatggagcaggcgctgacgccggatgaccttccgaagattgaaaaagaaatgaaacgcatcatcggtgaaaatctgccgatcatccgaaaagaagtgagccgtgatgaagcaaaagccatgtttgcggaaatcggcgataatctgaagcttgaactgctggatgcgattccagaagacgaaacggtctctatttatgagcagggcgaattttttgacctgtgccgcggcgtgcacgtgccgtctacaggcaaaattaaagaatttaagctgctgagccttgcgggcgcatactggcgcggcgacagcaaaaaccaaatgcttcagcggatttacggcacggctttctttaaaaaggatgacttgaaagagcatttgcgcatgcttgaagaagcgaaagagcgtgaccaccgaaaactgggcaaagaattaaaattgtttgccaactctcaaaaagtcggacaaggtctgccgctctggctgccgaaaggcgcgaccatccgccgcgtgatcgagcgctacattgtggataaagagctgagcctcggttatgagcatgtgtatacgcctgtcctcggaagcaaagacctgtacgaaacatcagggcactgggatcattatcaggatacaatgttccctccgatggaaatggacaatgaaacactcgtgctccgtccgatgaactgtcctcaccatatgatgatttacaaacaggacattcacagctaccgcgagcttccgatccgcatcgccgagctcggaacgatgcatcgttatgaaatgtccggggcgctttcaggtcttcagcgcgtacgcggcatgacgttaaatgacgcgcacattttcgtccgccctgatcagattaaagaagaattcatccgcaccgtccgtttgattcaagacgtatacgaagacttcggactgagtgattacacattccgcctgtcttaccgcgatcctgaagatacggaaaaatattttgatgatgatgagatgtggaacaaagcgcaatccatgctgaaggcggcaatggatgagatggggcacgactattatgaagcggaaggcgaagcggcgttttacggccctaaacttgacgtgcaggtgaaaacggcgatcggcaaagaagagacattgtcaactgtacagcttgacttccttcttccggaacgctttgatctcacttacgtcggagaagacggcaaacagcaccgccctgtcgttattcaccgcggcgtcgtatcaacgatggagcgtttcgttgctttcttaatcgaagagcacaaaggcgcccttccgacatggcttgcgccggtgcaattccaagtcattcctgtatcaccgtccgtgcatcttgactacgcgaaaaaagtgcaggagcgcctgcagcgcgaaggcctgcgtgtcgagcttgacagccgggacgaaaaaatcggctataaaatccgtgaagcgcaaatgcaaaaaatcccgtacatgcttgtggtcggtgaccaagaagcggaaaacggcgcggtaaacgtccggaaatacggcgagcagaaatcagaaaccgtctcattggacgattttgtgaaaaaggctgtagcagaagcgaaaaaataaccggaaatacaaaaaaccccgttcattcagaatggggtttttttgcgtataaaattatctttctttttgtttctctataatcgcaaacagctcgtgaagatcgctgatcacgtaatcaggcgcaatgtccgtatcatttttcttttgtgtccggtttacccagactgtcgtaatgcctgcccgtttcgctcccaatatatcagtattgaggttatctccgaccataatggcgtcttcttttttcaggttcaggaggccgaggcaatgttcgaatatggaggcatcgggtttcccttttccgaaagcgcctgagatgacgatttcattaaaataaggcgcgagctcaggaacgccggctagtttttctttctgcaggctgggatcgccgtttgtcagcagaagcaattcataaacacctttcagcttatcaagcaccgcaaacgtttcatcatacacatacgggcgctgtctgcgttccgccgcgaaaaactccgccaaatattcgccgtaagccgcatcgtctataccgacgctttttaagccgttcgtccaggcgtttcgtctgtattccggcgcaatccgattcagctgtttaaatccttcgctgaccggctcggaaaaattcgcccataatccttcaaacggattaatgccgatcatgaccgtataaggataggtttcgtatgacatatacaattcccgtgccgctttccgtaccgcctcttcaaatgtttgcgggtcaaggccatattttttttccgcttgtaaacatgtttccctgaatgttgttctgacgcttttttcatcccataacagtgtatcgtccaaatcaaaaaatacggctttcatgatcttctcctctttgttatattctgaaactctctgccgcaaggctcccgtttattctacaatagatacatagactgtgaaagatttgttttcagatgatttgaaaaaaacaggcaggtttgtgtcagattctgtctcgggctctaaaacgtgataaaataaaatttgaaagaacaggtgaaaagtatgctgcatttgatcatcatgatgctggaaagagtcggaattatcgtcatattgggatttgttctggctcataccagattgttcagacaggcgctccagcagcctgagagctataaaggcaaagcggtgctgatttcaattttctcgctgttcagtatcatcagcaactatacgggaatagaaattcagcagaatacaatcatgaataatgactgggtgtttcaaattaatccgtccggttcaattgccaatacaagaattatgggcgttgaaatcggcggactcttaggcggcccctatgtggggatcggcgtcggcatactggccggcctgcatcgtttatcactcggcggcgcgaccgcagtcagctgtgccgtctcatccgttttagcgggcattttgtccggctggatcggacggtatttcagaaaacgctacaggatgccgacaccgcgtgtggccgcgcttgtcggactcgggatggaatcgctgcaaatgctgctcatcctcttgatggccaagccgttttctgacgcttggacgcttgtgagcatcatcggcatcccgatgatattggtaaacgggtcagggacttttatttttctttcgatcattcagtcgattatccggaaggaagaacgggcgagagcccttgaaacccacagggtgctgatgattgccgatcagacgcttccgtatttccgccaggggctgaatgaaagctcatgcaaaagcgtcgccgccatcattcacaggcaaacaggaacggacgcggtatcgcttacggataacgaaaagattttggcgcacgtcggcgcgggtgccgaccatcatattccgtctgaaagcctgattaccggattgtcaaagcgcgttattaaaacgggtcatattatgaaagcgacatcaaaggaagaaattgaatgcacgcacgatccctgtccgctgcatgcggcgattgtattgccgctgacgtcaaacggcaaaacgatcgggacgctgaaaatgtactttaaaagcccgtcaggtttaagccgggttgaagaagagcttgcagaaggactcgccatgctgttttccacacagcttgaactcggcgaggcggaactgcagagcaaattgctgaaagacgcagaaataaaagcgcttcaagcacaggtcaatccgcattttctgtttaatgcgatcaatacgatttctgctctttgccgtacggatgtagaaaaaacccgaaagcttctgctgcagctcagcgtctatttccgttccaatctccagggggcaaggcagctgctcatcccgctttctaaagaactgaaccatctgcaggcgtatttatcattggagcaggcccgttttcctgggaaatataaaatcagccttgaaatcgaacgcggtttggaggacatcgaaattcctccttttgtgctgcagattctcgtcgaaaatgcgcttcgccatgcattttcaagaaagcaggacagctgtgccgtcaatgtgagcgtggtatccgccggtcagtcggttttaatgcgggttggagataacgggcggggaattgatccggaattgctgtccgtgctcggaaaccgtccgctcccgtctaaagaagggacgggaaccgcgctttacaatttaaatcagcggctgatcgggctgttcggccccaaggcagccctgcgattggaaagtgaggccggcaaaggtacggacgtatcatttgagctgcctttgaaactgatgactaaaggagaagaacatgctgaaggtgttaatcgttgatgatgaaatgctggcaagagatgaattagcttatttgctgaaacggacgaatgaagtaagtgacataaacgaagctgaaaatattgaatccgcttttgacagtatgatggatcaaaaaccggatctgctgtttttggacgttgatttgtcaggagaaaacggatttgatattgccaaacggctgaaaaacatgaaaaatccgccggccgtcgtttttgcgacggcgtatgaccaatttgctttaaaagcttttgaagtcgacgcactcgattatttaacgaagccttttgatgaagaaagagtgcgccagacgatcagaaagtttaaaagagtgaagcaggacagggcaggagccgtctcggagctgccgtccgcagccggagcgcataaactggctgtatcagccggtgaatctattgtcattttagatacgaaggacattatttacgccggcatggaggacggacacgtttccgtcaaaacgtttgccgcgtcttattccgttcatgaaactttggcggtcattgagaaaaaactgcctgatacgggtttcttgagagtgcaccgcgcgttcatcgtgaatacggagcatattacggaaattcatccgtggtttaattcgacttacaatctgatattaaaagacggttctaaaattcccgtcagccgtacatacgccaaggacttaaaaaagctgcttcatattatatgaggcggcttttgcatttcagcagccgttttttgcatttcagaatgaatattcagccgtttgttatgaaagcgctttaaaaatcgatttctcttttataatggacctaacaaagagaaagaggtgaagaaaatgagtgcgaaaaaagtgtacggatttctgacacaagcatttatttttgccgtagttatgctcatatctaatgggattgcagcgattgtccccattcctatacccgcttccgtagtaggtttggtgttattatttgtcctcttatgcctgaaagtgattaagcttgaacaagtagaaacgctgggaacatcattaacgtcactgatcggatttttatttgtcccgtcgggcatctccgtgatgaattcacttggcgtcatgcagcagtacggcgtgcagatcgcactcgtcatcttactcgccaccatcattctgttaggggcgacaggccttttttctcagctgatcttgtctgtcagccaaaaacgtcagaaggctgctccggctgataaacaaacggtgcgccgttccaatcaggaaaacgaacttgtgcagcattaggagggaaaacggatgagtccatatttcggtattgtcgtttcacttgcggcctttggcatcggcacgtatttatttaaaaaaacgagaggctttttcctcttcaccccgctgtttgttgcgatggtgcttggaattctttttctgaagctcggcggtttttcgtatgaagattataaaagcggaggagacattattaaattcttcctggagcccgcgacgatcgcttttgccatccctttatacaaacagcgtgccaagctgaaaaaatactggtggcagatcatgtcttccatcattgtcggctctatctgctcagtcacgattgtctatttgatcgcaaaaggcattcatctcgacgcggccgttatgaaaagcatgcttccgcaggcggcgacaacggcaattgcccttccgctgtcaaaagggatcggcggcatcaccgacatcaccgctttcgccgttattttcaacgccgttatcgtctatgctcttggcgctttattcttaaaactgtttaaagtaaagcacccaatctctaagggactggctctcggcacatcaggacacgcactcggtgttgcggtcggcattgagatgggggaagtagaagcggcaatggcaagtatcgcggttgtcgtcgtaggagtggtgacggtgctggtcattccggtattcgttcagctcatcggaggataaacccgggtcatagacccgggttttttattgtgttggcacgtccgcgggcggcaaagaacgaaatttcacatttttccttgcgctcaccccggcatcgtgttaaaatgaaaaagttgatccggagaagtcattcttgactaatgatccggtattgtgtagaatagttattgaattgaatataaatcacaagcagaggcacccgcttctcacctgattgacacattcatgtagttggcaggttgaccgtacatttttatttatgcagatgttcgtagtgtgggtgtgttgtcatgcccgcactttttgtttgcctgcagaatgcagtcaaaaagcgttgtgaatcaattcgaagaaactatggaggtggctcattattagcaaagatcaattggttaatgagggtatccgtgcacgtgaagttcgtctgatcggacaaaatggcgatcagctcggcatcaagtcccgtcaggaagcacttgaaatcgccggccgcgcaaatcttgaccttgtgttagttgcagcaaatgcaaaaccgcctgtctgccgcatcatggactacggtaagttccgattcgagcagcagaaaaaggacaaagaagcacgcaaaaatcaaaaaatcattaacttaaaagaagttagattaagtccgacgatcgatgagcatgactttaacacgaaattgcgcaatgcgattaaattccttgaaaaaggcgataaagtgaaagcttctatccgctttaaagggcgcgcaatcactcataaagaaatcggccagcgcgtattggaccgtttctctgaagcatgtgcggaagttgcgacagtcgaaacaaaaccaaaaatggacggccgcagcatgttcttaatgctcgcgccgaaaaacgaaaagcaataaggaggaaatcccatgccaaaaatgaaaactcaccgcggatctgctaaacgttttaaaaagacaggttctgggaagttaaaacgttctcatgcatacacaagtcacttattcgccaacaaatcccaaaagcaaaagcgtaagcttcgcaagggtgctattgtgagcgcaggagacttcaaacgcatcaaacaacagcttgccaacatcaagtaatcggacaaggaacaattaggagggaaatctaatgccaagagtaaaaggcggaactgttacacgtaagcgtcgtaaaaaggttcttaaattagcaaaaggttatttcggttcaaaacatacattatacaaagtagcaaaccagcaggtcatgaaatcaggaaactatgcattccgtgaccgccgtcagaaaaaacgtgatttccgtaagctttggatcactcgtatcaacgctgctgcacgtatgaacggtctttcttacagccgtttaatgcacggtcttaagctttcaggcatcgaagtaaaccgcaaaatgcttgctgatcttgctgtaaacgatcttactgctttcaatcagcttgctgatgctgctaaagctcagttagacaagtaagttgaaaaagccgctctctttccgggagcggtttttttacgtaaagggtgacaatcaatggctctcttcatttacgccgtattgataaacggatacggcttttggatcatgggcgctgataaaagaagagcaaaggcgcacaggtggagaatatcagagaaacgaatatggctcacagccgccatgttcggctcactcggcgtatggatcggcatgcgcaccttcaggcataagacgaagcacaaatcctttttatacggggtgccgctgctttttctcactgaagccgcccttgtgctcatgtatttgatgtataaaaaataaaaagcaggagagcttatcgctcgcctgcttttttcgcttttttgatgggctggtcccaatcaatcttgcaattcggataccgctccaatacctttttttcgacttcttcaaaatcatctgcagaaaagcggttcagcttttccggattttcggtccatacaaatattgtatggataaacagcggatgatctttggaagggatatgcttttctccttcaaagagcactcctttataagtaagctggagattttttcgcgtgtttttctgttcgtcaataaaataaaaattctcttttgattgcgccagtctgagccttcttttcgggtttgcgtaaaatttgacgcacatgtaaataaaataaataagaagtgcaagcaagacaatcctcaatactgtaatggccatatgtgtgaaggcacctcctcacctttgtcatgatctgatgtaatacgaaaaacaaaacaaaaagtttcatttttttaaaagaaatagataaaaacatttacccgtttttcaggcgaattaatcgtatgcttcagcattggttttgtataataagaagggtagtgaaaaaaaggaggtttattgatgacaaaattagatgaaacgctcaccatgctgaaagcgttaacggatgcaaaagggataccgggaaatgagagagaagtaagacaagtgatgaaatcatacatagaaccatttgccgatgatgtcacaacagaccggctgggaagtttaatcgccaaaaaaaccggcaaagaaaacggtccgaaaatcatgatctcagggcatttagacgaagtcggttttatggtgacgcaaatcactgataaaggctttctccgctttcaaaccgtcggcggctggtggtctcaggtcatgctggcccagcgcgtcaccgtcgtgacaaaaaaaggggacatcacggggatcatcggttcgaaaccgcctcacattctgcctcctgacgccagaaaaaaagccgctgatattaaagagatgttcatcgatatcggggcgtccagccgtgaagaagcaatggaatggggcgttcttccgggtgatcagattgtgccgtattttgaatttacagtgatgaacaatgaaaagcatttattggcgaaagcgtgggacaaccgtatcggctgtgcgattgccatcgatgtattaaaaaatctgaaaaacagtgatcacccgaatgaagtatacggggtcggaacggttcaagaagaagtcgggctgcgcggggcgaaaacagcggcacatacgatccagcctgatatcgcgttcggtgtggatgtcggaattgccggagatacaccgggaatttctgaaaaagaggcgcaaagcaaaatcggcgaagggccgcaaattattctgtatgacgcgtcaatggtatctcacaaagggctgcgcgaccttgtcgtaaacacggcggaagaagcgggaattccgtatcaattcgattccattgccggagggggcacggattcaggttctattcatttaaccgcaaacggagtgccggcgctgtccattacgatcgcgacgcgctacattcacactcatgccgctattttgcatcgggatgattatgagaatacggtaaaattgatcacagaagtaattaaaaaattagaccgggaaacggttgaccgtattacttatcaataaagatacggaagaatctgcttttttaagcagattcttttttttttgtctgtacaaatatgagccttgcgtctacaataagaaaagacatagaaaaatctgacaacatgtttttgaaagcgctttaaaaaaagggaggtttacaaatgaaaaacagattcagacgcatgatccgcttttcatgcgcagtcgttacagccggtctgcttctgatgtcttcatctccggcatctgccgcgttttggggggcatcaaatgaattgcttcacgatccgacaatggcgaaggaaggaaacacgtggtacgctttcggaaccggtttggaaggggagagggggcttcgcgtcttaaaggcgggcagcggcggcgtatggaccgttcagaaatcaatctttacttccccgctgtcatggtggggcaattatgtgccgaattacgggctgaatcaatgggcccccgatgttcaatattttaacggaaagtattggctgtattatgccgtttcttcattcggcaaaaatacctccgcgatcggtcttgcatcatctacaagcctcagttcgggaaactggaaggacgaagggcttgtcatccgttcgacaagcgccaataactacaatgcaattgatccggagctgacaattgataaagacggaaacccttggcttgccttcggttctttttggagcggcattaagctgacaaagcttgataaaaatacaatgaaaccgacgggatcactttattccatcgctgccagaccgaataacggcggagctttggaagcgccggccatcacctaccagaacggctactattacttaatggtgtcgtttgataaatgctgttcaggggtgaatagtacgtacaaaatcgcttatggaagatccaaaagcatcaccggcccatatctcgataaaagcgggaaaagcatgtctgaaggcggagggacgattcttgattccggcaatgaccgctggaaaggcccgggcggtcaagacattgtgaacgggaatattttagtgcgtcatgcgtatgatgccgaaaacagcggaattccgaagatgctcatcaatgatatcgattggagttcaggctggccttcctattaattgatcagccgggcatgtgtgtccggcttttttacttgcaataaaagattgacagtttgattcctccttaactataataaagttgttcgtacaaataaaagaataaaagttttattatttatattcgtacgtatatttatttaaaaatgcaagcgctttattttgatgggaaggggaaatgaatgtgcttcagaacaaagaatatgaattttggtttgtaacgggaagccagcacttatacggagaggaaacgctgcagcttgtcgataaacacgcaaagggaatatgtgacggtctcagcggggtgtcatcaagatacaagatcaggcataaaccggttgtcacgtcatctgaaacgatcagagaggttttgcgggaagcgcagtatcaagaaaactgtgccggggtcgtgacgtggatgcatacattttcccctgcgaaaatgtggattgaaggtctttccgcttttcaaaagccgatgcttcatctgcatacccagtatcatcgcgacatcccgtgggaaacgattgatatggactttatgaacagcaaccaatccgctcacggagaccgggagtacggatatatccagtcaagaatggggcagacgagaaaagtcatcgcaggctattgggatgatgaggaagtcaaacatgacatttcgcaatggatgaacacggctgccgcttggaatgaaagcaggaatattaaagtagcccggttcggcgacaatatgcggaatgtggcggttactgacggagacaaagtcggcgcccacattcaattcggctggcaggttgacgggtacggaatcggcgatcttaccgaggtgatgaacaatgtcaccgacgcagaaattgaggcgctttatgaggaatacgacaaattgtatgtcatcagcgacgaaacgaagcgggatgaagcaaaagttgcttccattaaagaacaggcgaaaattgaactcggattaacggcctttctcgaacggggcggatatacagcgttttcgacctcctttgaagttttgcacggaatgaagcagcttccgggtcttgccgttcagcgtctcatggaaaaagggtacggatttgccggcgaaggcgattggaaaacggctgcccttgtgcgaatgatgaaaataatggcggacggagaacaaacctccttcatggaagattatacgtaccattttgaaccgggtcgtgcgatgattctcggatcacatatgcttgaagtatgtccgacgatcgcccttgatcagccgaaaatcgaagtccatccgctctcaatcggagggaaggaagatccggcccggctggtttttaacggaatcggcggttcagccatcatcgccagcatcattgatatcggcgggcggttccgtctcattctgaatgaagcggaaggcagggaaattgatcatgatatgccgaatctccctgtggcgcgggtgctgtggaagccggagccatcgctgaaaacagctgcggaagcatggattctggcgggaggcgcccaccatacctgtatgtccttccggcttacggctgaacagatgcttgactgggctgagatggcaggcattgaaagcatctttatttcccgcaatactgaaatacatgagctgaaaaaagagctgaaatggaatgacgtattataccggctgggagggaattgatatggcgtatacgattggtgttgatttcggcacattgtccggccgggcggtgcttgtcaatgtccgcacgggcgaagaaatcgcgtctgcggtaaaagaatacactcatgccgtcatcgaccgcacgctgccgaagacgggtgaaaaactccctcgggactgggcgcttcagcatcctgccgattatatcgaagttctggaaacggcgattccgaacctgcttgagcaggcgggcgctgatccaaaagacgtgatcggcataggaattgatttcaccgcctgcacgattttaccgatagacggcgcggggcagccgctttgtatgctgccggaatttgaacgggagccccacagttatgtgaagctgtggaagcatcatgcggctcaaaaacatgcagaccgtttgaacacgattgccgaagacacaaaagaaacattccttaaaagatacggcggtaaaatttcttctgaatggatgatcccgaaaatcatgcaaatcgcggaagaagcgccgcatatatacaaggcggcagatcggattgtggaagcggcagactggatcgtctatcaattgtgcggttcattgaagcgaagcaactgcacggccggctacaaagcaatctggaatgaggagacggggtatccgccggatcattttttcgaaaagctcaacccgttaatgaaaacgattacacaggataaattaagcggcgcgatttattcagtcggggaaaaagcaggaggtttgaccgaaaaaatggcggagctgaccgggcttctgccggggacggccgttgccgtcgccaatgtcgacgctcatgtgtcagtgcccgcggtcggtattacagagccggggaaaatgctgatgatcatgggaacgtctacctgccatgtgctgctcggcgaggaagaacatatcgtccccggtatgtgcggggtcgtcaataacggcattttgcccggatatgcgggatatgaagcggggcagtcctgtgtcggcgaccactttgaatggttcgtcaaaacgtgcgttccgagagactatgagaaggaagctgaggataaacacatagacattcacgagctgctcagcaaaaaagcagcagaacttgttcccggggaaagcggccttctcgcgcttgactggtggaacggaaaccggtcaaccttggtggacgccgatttgacgggcatgatgctcggcatgacgctgcacacgaagcccgaagaaatctacagggcattgattgaagcgacggcgttcggaacgaggatgattatcgaaacgttccgggaaaacggcgttccggtcgaggagctttacgcagccggaggaatcgccgaaaaaaatccgtttgtcatgcagatttacgcagacgtcacaaatatggacattcaattatccggatctccgcaggcgcctgcactgggctccgcgattttcggagcgctcgccgcgggacgggaaaacggaggattctccaatattgctgaagcttgcgcgcatatggggaaattaaaagacggcttttatgccccgaaccgggaaagagctgagatttatgacagcttatatgcggaatataaagagctcgtacactacttcggcaaagaaaacaatgtcatgaaacgcctgaaagccattaaaaaccgtgattttgcgaaaggggggagccgccatgcttgaagcgttaaaagaagaagtgctcgccgccaatctgaagcttgaggaacataaccttgtcacgtttacatgggggaatgtcagcggcattgacagagagagcgggagaatcgtcattaaaccgagcggtgtcgattacagtgagctgaccgctgacaagctggtcgtcctgaatgaggacggagacattttggaaggctcgctgaaaccgtcttctgacacgccgacccatctttatctgtataaagcgtttccggctatcggcggaatcgttcatactcactcccgctgggcgacgagctgggcgcagtccggaagagacatacccgctctcggaacgactcacgcggattactttgaaagcgctataccctgcacgagggaaatgtatgaagaagaaattgtgaaagattacgagtatcatacaggcaaagttatagccgaaacctttcaaaacgaaccgtatgaacaaaatccgggtgtcctcgtccacagccacggcccgttctgctggggaacggacgcgctgaatgccctgcataacgccgttgtgctcgaaacggtagcggaaatggcctaccattcgcttatgctgaacaaacagctcagtccgatcgacagagtgctgcatgataagcatttttacagaaaacacggggcgaatgcttattatggccaaacttgacgcagccgggtttctgattgatttagacggaaccgtattcagggggcgggagctgattgacggcgcaaaagaagccgttcatacccttcagtcactgggcaaagccgttgtctttttaagcaaccgcggcaatctatcaaaagcaatgtgcagaaagaaactgctgggtgccggtatccgcacggatgaacggagcatcgtgctgtcctccagtgtgacggcatcatttttaaagaagcattatcctttgtcaaaggtctgggtgttaggagagaaagggctgactgatgaactcgctttagcgggtgtcgtcctggcgcaaaacccgcaggcggcagactggcttgtcatctccctgcatgaaaccgtcacctataaggatctgaatctcgcttttaaggcggcttcctccggcgcgcgcatcatcgccacgaacaaagaccgctcctttccgaatgaaggcggtcatgccatggatgtcgcgggaatgatcggggccattgaagcatccgccggagcaaaaacggagcttgtcatcggcaaaccgtcttggctgatggctgaggcggcatgtgaagcgctcggacttccccctgaggaatgcgccataatcggagacagcctcgaatctgatatcgcaatgggcaggctgtacggaatgaaaagcatattggttctgacggggtcggccaaacttggggagccccgtctatatgaacctgacatcgtccttgattctattaaagacctgacagaattagcgaaggagggaatccttttatgaaacgttctcctgaggacattcaatccgagtttgacaaggaaggggccagccgctcaccgattcaaatagaagatatcgtgatcggggcgaatgcaaaagaagagcttctcagatttctgcaaaaaaaatgctggaatcatccggtcatcgtctgtgaccggaacacgtacgaggcggcgggacgtctgcttgcggacgaattaagggcaggcggaatcaaagcgtcaaaagtcatcattccggagcatgaagccggggccgccgcggctgatgagaggacattggtctatacgctgatcaatctcgcggaagagacggatgttatcatagcggccggttcaggaacgattcacgacattacgcggtttgccgcttatcagcgcggattgccgtttatctcattccccaccgctccgtcagtcgacggttttacatcggcgggagcgccgctcatattaaacggaatcaaaacgacgattcaaacgaaagcgcccatcgccttatttgccgatacgaatgtattaaaagaagcgccccgttcaatgacagccgcgggcttcggagacatgctcgggaaaataacatcgctggctgattgggagatttcccgcaggcttgcgggtgagccgtactcagaagccggggcgaagcttgtgaaagacgcgctttggcagtgcattgatcaccgcgctgacattgccatgggaacggaggccggcattcagatactgatggaagcgctgatcgtttcgggtcttgtcatgcttgctcttgaccactcccgccccgcctcaggaggagagcatcacatctcgcattggattgagatggaaatgctgaaggcaaaacagcctccgattctccacggtgcgaaggtcggctgtgcgtgcgcggtgctgagtgatatttacaaagaactggcttgtcacgaaaagcttgctgaactgccgccgcactttcgcgaggcgattcagtccgcatatgaagggcttcccgacggcaaaacaattgccgggtggctctcatctgcgggaggtcccgcctgtttcgatgagatcggtgtaaaaaaggaccttgtcagcgatgcgcttaagcatgcgcacacactgcgagaccgttataccggtttaaccatcataaatgaaaatgcagcgctctttgcacatcatttgcatcaatagccgcacggcctaaagtggaaggggtaatgacatgaaaaaaacgaccgctgtatgtttggtgctgatgatgctcttcttgtttaccgccggctgttcacaagaacggactgccggccggccgggagaaacggagctgacgttttggacgtttaacggtctgcacgaacagttttatcaggaaatggtcaaagaatggaatcagaagtatccggatcgcaaaatcaagctgaataccgttgtttatccttatggacaaatgcatgataatttatcggtttcgctgatcgcgggtgaggggcttcccgatatagccgacgtggaattaagccggttctcgaactttctgaaggggaaggatatcccgcttgccgatctgacgccgctgattgaaaaagaccgcgataagtttgtggaagcgcgtctggccttatacagcaaaaacggaaaattgtacggccttgatacacatgtggggacgaccgtcatgttttacaacatggatatcatgaaaaaagcgggcgttgatcccgcctccattaagacatgggaagattaccggcgggcaggaaaaaaagtgcgtgaagccgctgggaaaccgatgggaacggttgaaacaaacgactccgccacattcctatccatgatttcgcagcaagggtcaggctactacagcaaaaacggaaaattgattctgaacagcaagacgaatacagatacactgaatgatgtaaaggacatggtaaatgataaaacccttctgccggctcccggcggcggccatcacagcgaagaatactacggttttatgaatcagggcggggcagcctcagtgctgatgcccatttggtacatgggacggtttatcgattatatgcctgatttaaaagggaaaatggcgatttaccctatgccggcctggaaagaaggcggtgacagatcagcgggtttaggcggaacagccaccgtcgtgccgaagcaggctgaacatctggagctcgcgaaagaatttctcggatttgcgaaaggttcaaaggaagggaacataaagctgtggacggtgctcggctttgacccgctccgctgggacgtgtgggattcaaaagaattgaaggagaaaaacaagtacacggatttcttccggaacggtacgtcaattttttcctcgctccttgaaataaaagatgagatcaatccgatttatctgcatgaagacttctctaaagcggctgatctcgttgtcagacaggtgctgttcgatgcgctgaagacgcaggaaaaaacacctgaggaagccttggacgaggcggcagagcaattagaaaaataggagaagccgccctatttaacagtgaaagcgggggagcttttatgagacctgtaaagacagagacagcgcaaaccgtttctgcagtccggaagaagccgcgccggcgcaatgtgctgtattcaaaaaaagcggcgccttatctttttacggcgccatttatcatttcgtttctcgttttctttttgtatccgatcatcagcgtgtttatcatgagctttcagcggatactgccgggagaaattacatttgtcgggttttccaattataccgctcttcttaatccaaccttttatacggcattatttaacacattggaatatactttctggacgctgatcgtgctgattccggtgccgcttcttttagcggtgattctgaattcgaagctcgtcaggttcagaaatgtgtttaaatcggctctgtttgtaccggctttaacatcgacgatcgtagcggggattattttccggctgatgttcggagaaatgaatacgtcgcttgcaaacgagctgatgatgaagcttggcgcatcaccccaaaactggctcaacaacaaaggtaccggcatgtttttaatggtgctgcttgcgtcatggaggtggatggggattaacattctttactttctggcgggtttgcaaaatgtgccgaaagaattgtatgaggcggctgaaattgacggggcgagtacgtggaaaaagttccggcatatcacccttccatttttaaagccggtgtccgtttatgtgttaacgatcagtatgatcggcggtttcagaatgtttgaggaaagctatgtgctttggcagaataattccccgggcaatatcggcctcacgcttgtcggttatttatatcagcaggggcttgcatacaacgaaatggggtacggggcagcaatcggaattgtccttttgcttgtcatcttactagtcagccttgtttcactgaaactgtccggttcgtttaaaggggagggataagcgttgcgtaacaatcacatgttttccgtgtacagagtcgcgtttaccttgttttttatcatgctgagcctgttgtatatctttccgatgatctgtctattgctcggttcattaaagccgtcatctgagctgatgcgcatcgggctgaatctgcgtcttgatccggatgtgatgagccttgataactacacctatttgttcaacggggggagcatttattttaaatggttttttaacagcctgctgctcggcgtcctcaccacggttctcacgctgtttttttcctctttgatcggctacggactcggtgtctacgagtttaaaggcagaaatattattttcgttcttgtgctgatcattatgatggtgcctcttgaagtgatgatgctcccgttgttcaaattgacggtgggtcttcatttaatcgattcttatacgggggtgattctgccgtttattgtgtcgcctgtcgccgtgttctttttccggcaatatgcgctcggacttccgaaggatcttcttgattcagcgagaatggacggctgcaccgaattcggcattttcttcagaattatggcgccgctcatgaaaccggcattcggagcaatgatcattcttcaatctttaaacagctggaataactttttatggccgctgatcgtgcttcggtcgaaagaaatgtttacgcttccaatcggactttcagggctgctgagtccgtacggcaacaactatgacatgctgatttccgggtccgtttttgcgatactgccggtgatcatcatattcttgttttttcaaaaatacttcatttccggcctcacagtaggcggagtgaagggatagagagagggaggaaatgtaatgaaaaaagcggggattacagcagataaagaatatatcatcggtgaagtggacaaacggatgtacggatcttttatagaacatatgggccgggcggtgtatgaaggcatttatgagcccggacacccgaaagccgacaaggacggtttcagaacagacgtgcaggagttaatcaaggaattgcaagtgccgttcatccgctatccgggagggaattttctctcaggctacaattgggaggacggcgtcgggccggtgaagaaccgcccgcggaggcttgatttggcatggcagacgacagaaacgaacgaagtggggacgaatgaatttttaacgtgggcgaaaaaagtgaacgccgaagtgaatatggcggtcaatctcgggacgagaggaatcgatgccgcccggaacctcgtcgaatactgcaaccatcctgaagggtcatactggagcgacttacgaaaatcgcacggatatgaaaaaccttacggcatcaaaacatggtgcttaggaaatgagatggacggcccttggcagatcggtcataaaacggcgcatgaatacggacggcttgccgctgaaacagcaaaggtgatgaaatggacggacccgacgatcgaattggtggcttgcggaagctcaaacagcggcatgccgtccttcatcgagtgggaggccgaggtgcttgagcatacgtacgagcatgtggattacatttcactgcatacgtattacggcaaccatgaaaatgatcttgagaactatttggcgaagtctatggatttagaccattttattaaatccgtcacagccgtatgtgattatatgaaagcgaaaaaacgcagcaaaaaaacgattcacctttctttagatgaatggaatgtgtggtatcactcaaatgaagcggataaaaaagtggagccatggattacggcccggccgattctcgaagacatctacaattttgaagatgcgctgttgatcggttcactgctgattacgatgctgcagcatgcggacagactgaagatcgcctgtctcgcccagcttgtcaacgtgattgcgcctatcatgactgaaaagggcggagaagcatggaggcagccgatcttttacccttacatgcacgcctcagtctacgggagagggacttcgatgaagctgctgatcacctccccgaaatacgactcggcggactttacggatgtgccgtatgttgatgccgcggccgtttaccatgaagaggatgaagcactgaccatttttgccgtcaacaaaagcaaggaaccgatggaaacggagatcaaactgagggggtttgaagattaccgcatcattgagcatatcgtgctggagcatcaggatatgaaagcaaccaatcaaaaaaacagaaaagaagtcattcctcactccaacggaacgtcttcggcaaacgctgaagggataacggcacattttactccgctgtcctggaatgtcatccgtttatcaggaaaataatgttccgaaaagccgggctgccgctgccggcttttttttacgcaaaaatcatctcctgttatctgataattatgataatatttagaaaaagagaaaaggggctgggattaaatgaatgcgattacaatcgtcatagcgtctatatgtattttggcgatcgcctatcggctttacggtacctttatgatggtcaaagtattaaaaatcaatgatcagacaccgactccggcccatgtgcttgaggatgggaaagattatgtgcccacgaataagtgggtgtcattcggccaccacttcgcggcaatcgccgctgccggcccgcttgtcggaccgattctggcagctcagtttggctatctgcccgggcttttatggctgttaatcggagcggtgatcgggggagccgtgcacgatattgtcgtattgtttgcatcaatgcggaaaaacgggaaaacgctttctgaagtcgccaaagaagagctcggcccggtggcgggcttttgcaccggtctttccatgctgtttatcattacgatcacgatggcgggtctgtccatggttgtgctgcacgcgcttgagaaaaacccgtggggaacgtttgcggtggggattacgattccgatcgcgatgggggtcggcctctactataaaaaaacgggcaatctcaaactcgcatcaactgtcgggtttcttttgttaatggccggtgttgtaatcgggccgcggctgcagacaacggctctcggggacatgctgacacttgatgcgaaaacgcttgcagtggcgcttcccgtctatgcgtttttcgccgcggcgcttccggtttggcttttgctggctccgcgtgactatttaagcagttttatgaaaatcggggtttttgccgctttgatcgcaggcgtctttttcgtcaatcccgccattaaattcccggccgtaacggagtttattcacggcggagggccggtgatcgcgggtcctgtctggccgtttatttcaataacgattgcctgcggcgccatttcgggctttcatgcatttgtcggttctggcacaacgccgaaaatgctggataaatggagtgatataaaaccggttgctttcggagcgatgcttgtggaatgtctcgtcggaattatggcgctcattgcagctgccgctcttgagcccgccgactattttgccattaacagcacgcctgaaatattccgcgccctcgggatgaatgtcgtccatctgcctgaattgagtaaagaaatcgggctcagtctggaaggaagaacgggcggagccgttacgcttgccgtcggaatgacgtatatctttacggagattccgtttttcagtcatttggcttcatacttttttcaattcgtcattatgtttgaagcggtgtttattttaacggcgattgatgcgggaacccgtgtcgcccggtacttgattcaagagtttttcggagaggtctataagccgctgaaaaaaacagactggctgccgggctcgattttctcaagcgcgctcgcctgcctgctgtggggctatcttctgtattcgggcgacatcagttccatttgggcgctgttcggcgtatccaatcagcttatggcatctgtcggcttaatcatcggtgcgaccgtcgtattaaaaatagcggataagcggcgctatatgctgacatgcctgattcctctcgcttatttgtacgtgaccgtcaactatgcgggttattggatggtgcggtatgtgtatttgaaccccgaagcggcgggatacaacgtgctgaatggcgttttatccattatcatgctgattctcgggcttgtgattatcattgcggctgtgaaaaaatgggcgaatgtatggcgtgatccgagtgccagactggaagcttcaatacccggataaatccgcggccgatccgaacattgtagcatcataaaggcagagagccgatcggtctctctgctttcggcttatgacaaatccgccgcttccaaaaggtaatccgccaaatgaaccgcgcggacacggcctgttaatccttcgcgtaaaatgccgagctgcatttgcagaaggcatccgggattggctgtcacgatgacggccgcctccgtttttccggcggctttcatcttgctgtctaatattttcatagacatttctgactctgttatattataaattcccgccgacccgcagcagctgtcggccttttccatttctctgtactcagcccctttaatgtttttcaaaagcgtgcgcggttcttctgacgtatgcatcacattgcggagatggcaggagtcctgatatgtgacgatatgaggagactgcgcccgcaggtttttttgatggaacttcagatcaaccagtacggatgaaaagtctttgagcttccggacgaattgttcggcacgttccgcccatccaggttcatctttcagtaaatgcggatattcctgaagaaaggcgccgcatccgccggcgtttgtaatgatataatcagcgtcaagcgcctcaaaagcggcgatattccgcttggccagttcttttcccatctctttttctccgctgtgcccgtgaagcgcgccgcagcacgcctggccgtccggaaccgcgatttcacacccggccgcctgtaaaagcgccgttgtcgcatgatttgttgctaaaaacatcgtatccattaagcagcccgagaaaaaagcggcccgtttttggacgggacccgcggcaggaagaaaacgcggcctttccttcatgtctttccgtttcggggcgggcgggagcacttgttccattgtgcgcagatgttcaggcaaaacgcgcagcataccggtttttctgatggcggtctgcagtcccgatctttggtatattccgagaagattcacggctgcctgcatgcggttttgatgagggaaaagcccggtgaaggcggctttccgcaagaggcgcacgccgggcttatgttttttattttgatgaatgatatccctcgcttcttcaagcagctgtccgtaattgacccctgccggacaaacgggctcgcatgcccggcatccgagacacagcgaaagtgagcgctcgacatcttcatccggttcgatcagtccgtctgtgacggctttcatcagggcgatccggccgcgcggcgaatgggattcttgaaatcctgattcgatataggtcggacaggaaggaaggcagaagccgcagcgcatacagttcagcaattcaccttcatccatgcggtttttgaattctgtttgaatgtgttgctgctctttagccgttgtcatttcatcatcaccacgcgtttccttgatgaattggcgaatatttttcccggattcagcagattttggggatcaagcgcttgtttgatcgctttcatggcggtaatgccttctgttttcagcttcatttctaaatacggcgcttttacgatgccgaccccgtgttcacccgttatcgtcccgcccagctcaatcgctttttcaaaaatggcggcaaaagctttttcgacacgttccatctcctctgtatttcggatatcggtggtgcacgtcggatggaggttgccgtctccggcatggccgaatgtgcagatggacaggccgtatgtttctgcaatctcgttaatggctttgaccatgccggcaatttgtgatctcggcacggtcgcgtcttccagaatcgtcgtcggtttcagccgggcaagggctgataatgcggaccgtctggcctctgtaagcgcgaatgcctcttcctcggtttcggccgtttggacggatacggctgctccgtttttacagatggcttcgattttttccatatctcgtctgaccgtttcgatgtcaccgtcctgttcgatcagcagcaccgcttttgcatcggtcggaagcccgatcttggcgtaatcttcaatgacctgcagtgtcggctgatccagaaattcgagtgtcgccggaatgattttttcagcgatgatggcagaaacagattccgcagccgcttcaatatgttcatagagtgcaagcagcgtttttttcgtttccggcttcggaaccagctttaaagtcgcttccgtcacaacgccgagcgtaccttctgatccgacgaaaagccgggtcagatcataaccggcgacatcctttgtcagcttccctcctgtgcggatgatatcgcctgaagccaagacggcttcaaggccgaggacataatcccgggtgacgccgtacttcaaaccgcgcagcccgccggaattttcattaatattcccgccgatcgtcgatattttcatgctgctcggatcaggcggataaaataaccctttcctttcaaccgcatgaatcatatcttgcgtgatcacgcccggctggacggttgccgtcaaattttcttcatcgatttcaagaatgcggttcatatgtttgaataaaagcacaagcccgccttcagacggacatgtgccgccgcataagtttgtgcctgaacccctcggcacgatcggaatgtcatgcctgctgcaaatcgttaatatacgggacacgtcatccgcgctgcggggagcgattaccgcatccggcatggcttgcagctgaggagccgcatcgtaagaatacacaagacggccagccgccgaatcatcataattctccttcccgaccgtccggatgaacgcttcttttgcctctcgtgaaatcatgttctccaacctccctgataagaaaagcgttttcatttaattgtaaagaaaaacgattcttcacactatggagaaacatatgaaaaatgatgatatgattacgtgctttttgtatgttgatctaaaaagcggagcgccaaataaaaagccgttatgtcttcggggcggtcaagcttcatatttgtcagtgattccagtttggaaagacggtagcgcaatgtattgatatgaatatgcatgtcgtctgcggtgcgctttaacgataattgccggtcgaaaaaggcgcgcagcgtatccagaagttcttcccggccgagtacatgctcgagaacccgccgtgaaaattccgacctcgtgccgggcgcgatatcggcaatacacatatccagttttaaatcttcttcaaagacggcctgcttgtcaccgattccggctgaaagtgctttatccgcctgttcgtatgattccgcgaggcgctctcccggaacgatccgtccgatgccggcggtgacaggctgcccaaaaacggcgccgatctttttgatgagctgtgttttggaagccgaatttgcttcatggttaatgagaatgcgttcatttccccagcggacaaacaggtcttcagggcattcgttctgccagagccgcccgagctcctccgctttatattgctcataacgtccttgaatgagtatgatccggcggtatgcgtgaaggtctgcgccgatgagctttgctttttctaaaaagcccggagaccattctttcagctgcagccaatcaaccataaaggattcaagcattctcgcacgccactgcgcttcttccatatggcgcgtttctttaataaacagctccgtcattttcctgagcaattctccgaaaggcaggatatcgtcagggtctcctgtcagaccgaacactccgattacctcatggcctgaaaaaacggggaggttcagtcctgcttttacgccctggaggcgtttttcatcttctttcgtaatgatgacattccgtttttcgcgggcgcagatcagtgcgccttcatgaaaccatccggcgcgcgcctcattggtgcccgcgatgatcatcccttttgtatcggcaataatcacttcgcggctgtacatatgtttgacttcggcaatcaatttctttgccagttccggctgtaactgcatggcgatccccctcgccattattatacaaaaaaaaccgggtgtgccatcacccggttcatgcttattgcgcaggttttaatccgccttcaagtgttttgagcatttcatttttttctgagtctgacgcatgctgccaaagaacttcgaataagacgccgaggcccggaagcattttttcttcaccgctttggatggcgtcaacgatagtatgctccagctgatcctggttattgccggttacattggcaataacggcgttgcgtaaattaagatccattacaaccgctcctttttcctgaatgtgatacgcatattcttaccgcgcacgcggtttattatgtgctgttcttgagatataataacaacatgcatgaaaaaaggagagcacagacataaagtgaaacgaatcgactctgcaaaaaaccaaaaagtgaaggactggaaaaaacttcacacaaaaaaagagagacttaaaacgaatacatttctgatagaaggagagcatctggcagaagaagcgctcaaatcaaagggaacggtaaaagaaattctcgtaaacgatgagagcgccattccggccgatctggatatgagcattccgtgctacgtgctgagcgaagacgcgttttcagccgtgacggaaacggaaacgccgcagcggatcgccgcggtctgccatatgccggataagcggcctgatcagctgaagcggctgcttctgattgatgccgtacaggacccggggaatttaggaacaatgatcagaacggcagatgcggcgggaatcgacgccgttgtccttggtgagggaacggcagacccgtacaacggaaaaacgctgcgttcagcgcaaggatctcattttcatattcccattttaaaacgtccgcttgatgagtttaccgccgagctgaaatcacaaggcgtcgcgatctacggcacggcgcttgaaaacggtgcggcttatcaaagcgtgaagcctgaagaatcgttcgcgttaatcgtcgggaacgagggggcgggagtggacgccggccttctgcaaaaaaccgatctcaatctgtacgttccgctgtacggacaggcggaatcgctgaatgtggcggtagcggccgccatcctcgtttatcatctcagaggataggttgcgaaaaaccttggatttcactataatagatagcaataatgtaaaaaccgtgacagaggacgtcaatttttgcacacgctgccttccagggagaaaatgccgctgactgagagcatttttatcgcagcacagaaattgattttcacctctcgagttgtcaccgggaccgcgccaaacgcgcgtaaaggtgaaccggaacgatcgtttccgttatgtcaatgaagctgtcggcagatgaagtctgccttaaaaagggtggtaccgcggccacaactcgtcccttctctcaaggggcgggtttttttgttttctgaaaaaggcatagaacggtttggtttacataaaaggaggatgcatgatggaagagaagcttaaacagctcgaactggaagctgcagaaaaagtagaagcggcgggttcattaaaagaagttaacgacattcgggtgcaatatctcggaaaaaaagggccgattacagaagttctccgcggcatgggcaaactgtccgccgaagagcgcccgaaaatgggagcgctcgccaatgaagtgagagagcgcattgcagcagccattacggcgaaaaatgaacagcttgaacaagaagagatgaataaaaaactcagcagccagacgattgacgtcacgttgccgggcagtcaggtaaacatcgggggacgccatccgctgacggtcgttattgaagaaattgaagatttatttatcggcatgggatataccgtcgaagaaggccctgaagtggaaacggattattacaactttgaggcgctgaacctgccgaaggaacatccggcccgcgacatgcaggacagcttttacattacagaagaaatgctgatgagaacgcagacgtcaccggtgcagacgcgaacgatggaaaagcataaaggaaaaggccccgtcaaaatcatttgtcccggtaaagtgtatcgccgcgacaacgatgacgcgacacattcccatcagttcatgcagatcgagggtctcgtcgtggaccgcaaaatcagcatgagcgacctgaaaggcacgcttgaattggtcgccaaaaaaatgttcggccaagaccgtgaaatcaggctccgtccgagctttttcccgttcacagagccttctgtcgaggtggatgtgacctgctttaagtgcggcggacaaggctgctccgtctgcaaaaaaacaggctggatcgaaattctcggcgccggcatggttcacccgaacgtgctgaagatggccggattcaatcctgaggaataccagggttttgctttcggaatgggtgtggaacgtatcgcgatgctgaaatacggcattgaagatatccgccatttctataccaatgatgtcagattcatttcgcagtttaaacaggcgtaagaggaggatacacatgtttgtttcatataaatggttagaagattacgttgacttgcagggaatcgacccggccgtgcttgcagaaaaaattacgagagccggtattgaagttgagggtatcgagtataaaggggagggcgtaaaaggcgttgtcatcggacacgtgcttgagcgtgaacagcatccgaatgccgacaaactcaacaaatgccttgttgatatcggtgcggaggaacccgtgcagattatctgcggcgccccgaatgttgataaaggacagaaggttgccgttgcaacggtcggagccgtgcttcccggcaatttcaaaattaaaaaagccaagctgcgcggcgaagcgtctcacggcatgatctgttcccttcaggagctcggcattgaaagcaagctcgtggcgaaagaatatgcggaaggcattttcgtttttccgaatgatgctgaaacgggagctgacgcaatggcggcccttcagcttgatgatgcgattttagaattcggcttaacgccgaaccgcgccgacgcgatgaacatgcttggcgtggcttatgaagtggcggctatcctcggcgcagaggtaaagcttccggaggcttcatatgaaaaagcggcagaaaaagcggcggatgctgtttccgtcaagattgaagatacgcaggccaatccgcattatgccgcaaaaatcattaaaaacgtcaaaatcggcccgtcaccgctttggatgcagacgaagctgatgaatgcaggcatccgcccgcataataacgtcgtggacattacaaacttcgtcctccttgagtacggacagccgcttcacgctttcgattacgaccggttcggttcaaaagaggtcgtcgtcagaaaagcggcggaaaacgaaaccatcgtgacgctggatgaacaagagcgcaagctgtcaagcagccatttggtcatcacaaacggaaaaaaagcgcaagccgttgcgggagtcatgggcggagccgagtctgaagtccgtgaagacaccactgcgattttactggaagccgcttatttcgacggacagaccgtccgcaaagcgtcgagagacctcggactgagaagcgaagcgagcgccagatatgaaaaaggcattgatccggcccgcgttttgctggcggctgaacgggcctgcagtctcattcaggcatatgccggcggagaagtgctctcaggcacggttgaagaaaaccatctgaaaatcgaagcaaacaacattcacgtgtctgttgaaaaagtgaacgccgtgcttggcatggcaatcgctaaagaagaaatcatcagcatttacaagcgcctcgggtttgcagtcagtgaagctgaagacgttctcgtcgtaacagtgccgtcccgccgcggagatattagaatagaagaagacctgattgaagaagcggcgagattgtacgggtatgacaatattccgtccacgcttccggaaacggccggcacgacaggcggcttgacaccgtatcaggcaaaacgccggaaagtgagacgtttccttgaaggagcgggtctttcacaagcgaccacttattcattaacgaatgataaaaaagcggccgcttttgcgatcgaaaaatcattcaacacgatgcttgctctgccgatgagcgaagaaagaagcattctcagacacagtctcgtgccgaatcttcttgaagccgtttcatacaatctggccagacagactgattccgttgctttatatgaaacgggttctgtatttctgacgaaagaagaaaacacaaaaccggttgaaaaagaacgggttgccggagctgtaaccggattgtggcgcaaaaatttatggcagggtgagaaaaagccggttgatttcttcgtcgccaaaggaatcgttgaaggcctgctgcatcaattgaatgtgtcagatcgggttgaatttgtccagtctgcacgcaaaaacatgcatcccggccggacggcaaacattctattgaacggttcgcttgccggatttatcggccaggtgcatccggcaatggaaaaagagctggatatcaaagaaacgtatgtgttcgagcttgatctgcacgcgcttctgaccgaggaaacagaacctgtcgtgtatacgccgattccgaagtacccgtccgtcacgcgcgacattgcgcttgtggcagataaaaccgttacaagcggacagctcgaagccgtgatcaaagaagccggcggcgcgctgctgaaagaagtcaccgtatttgatgtgtacgaaggtgagcatatggaagagggcaaaaaatccgtcgccttctcgctccaatatgttaaccctgaacaaacattgacagaagaagaagtgacaaaagtacatgaaaacgtgctgaaagcgctggaagaaacgtatcaggcggtattaagaggataaagaaaaagcttgcagatcattctgcaagctttttttattatgaccgtttccgttctacaaggcgtttcgctttttgcgtattggcaaaatgaagtttggtgaacgttctgagcgcaccttctcccttattgatgatcagcttggcggcagcttcatcgacgtgcggccccgcgccttttggaatcgtcatcccagcctcacgggaaagcttatccatttcaattaagaaagaatatcgcgcaatgatagaggctgcggcgacggaaagatgtatgctttccgctttcgtgctgaaaaacgttttttcttttacgatatcccgtccggaaagatgcttaaaataaatgccgggctctgcaaattggtcaatcagaatcgcttccggtttaacgccgttcatttttctcagcagattggaaatcgcctgattatgaaggagcgccttcatttttccttggctcatgcctttttcctgcatctgattgtatttttcgtttttcaacacaagcaggctgtaaggaatggttttaattaacagtttggcgatttcaataatctgcggatcttttaaatccttcgaatccttcacaccgagttctttcattaaagaaagctttgttttgtcggcgtaagcgcaggcaaccgttatcggcccgaagtaatcgcctgttccgacttcatcagagccgatcactgacatggaggcaatgcccgccgggggagcgtaaagcggatcggccgcttttttgacggttttctttgccttcggcgcctcagccgttccccagcgggccgcttctgtgccggcgttttttccctgaaagagaaccttgcccgagcggtaggctgtaatggtacagcccgggggcttggcctggaagacggcgccctgcggaacggcgggagtaagggagccggcataggattgtttcatttgttccatagcggaagcggatacttttataacagaatgggacacgatataatctccttttttggcacttttcactgtatataccagtgtatcataacagcccgaggcttgtctttccattcaaacgataatcgtggtatgataggaactaggattctcgcggaatggaggagaaacgttgtctgacggcaaaaaaaccaaaacgacagtaaacatttacggccagcacttcaccattatcggggaagaaagcaaagcgcacatgcgccatgtggccggaatggttgatgataaaatgagagaaatcaacgagaaaaatccatatcttgatataaataagctcgctgtattgactgcggtcaatgtcgtgcatgattatatgaaactgcaagaaaaatatgaaatactggagcggcagcttaaagaaaaggaatgaacaccatatgatagatatcatcatcttagttctgctcttaatgggcacattgcttggattaaaaagaggatttatcctccaatttatatacttgacgagtttcatcctctcgattgcgtttgcggcgcttttttacaaaaacctggccccgcatctgagctttatacccgcccctgatttttccggcgggcaggcggctctgtcttttattaaaggaaacgtggagacggcttattacaacgcgatcgcgtttgtcattttgtttatcatcgcaaagatcctgctccggattatcggagcggcgcttaatatcatcgccggcattccggtcattaaacagatcaacaaactgctgggcggggtgcttggatttctggaagtctatttatttgcgtttatcctgttatacgtcgcatccgtactgccggtaagcgtgcttcaggatatgctcgcacaatcgacgcttgcaaatatcatcacacatcatacgccgtatctgtcggggctcctgcaagaactgtgggcccagtacggggcataaaaaacttctcttgaccggagaagtttttttcaagctctgcgtcagttgtgccggaagagaaaaatttgtatgatgaaaagcaggaaacgactgggggttaacagtatgcataaaaaagatatcatcaggctgcttgaaacgattgcggtctatatggaactgaaaggggacaacccgtttaaaatatcagccttccgaaaagcggcggcggcgcttgagcaggatgaccgcagcctgtcggaaatcgacgacatgatgtctttatccggaatcggaaaaggcacctacggcgtcattcgtgaatatatgcaggaaggtgtgtccggcacgcttctccaattgcagaaagaagtcccggaaggcttggttcctcttttgaagcttccgggcctcggcggcaaaaaaatcgccaagctgtaccaggagcttggcgttcatgacgcggaatcgctgaaagaagcatgcgagcagcaaaaagtacaggggctcgccggtttcggcaaaaaaacggaggagaaaatccttcaggctctcggagaagccggaaaacagccggaacggtttccgatcggctatgcgctcagcattgcttcagtcattgaagaacatttggcccggctgacggatattcagaaatattcccgggccggcagtctcagaagagcgcgggaaaccgtaaaagatctggattacattatcgctacagatcgtccggaggctgtcagagaacagcttctttccctcccgaacgtaaaagacgtgatagcgggcggggatacaaaagtatcggttatcctgacctttgaatacgagacgagtgtggatttccggcttgtgacagaggaacagtttgccaccacactgcatcattttaccggttctaaagatcacaacattaaaatgcgtcagctggcgaaagagcgcggtgaacggatcagtgaatacggagtagaaaccatagaaacgggagacgtcaaaacattcccgagcgaagaagcgttttacgcccacttcggtctgccgtttattcctcctgagctcagagaaagcgggcaggaggtcgacacgtaccgggaagaaacggaccttgtggagcataaagcgataaaaggcgatctccacatgcactcagcctggagtgacggcgctttttccatcagagaaatggcagaagcgtgtatggcaaaaggctaccagtacatggcgatcaccgaccattcccaatatttaaaggtagccaacgggttaacggccgaacggctcagaaaacaggcggaagaaattgacgcgttaaacgctgaatttgaaaattttcatatttttaaaggcgtagaaatggacattctccccgacggttcgcttgattatgatgacagcgttctgtctgaaatggatcttgtcatcgcatctattcattcaagcttcagccagccggagcatgtcattatgaaacggcttgaacaggcgctgacgaataagcacgtggacattatcgcccacccgacgggacgcctgatcggcagacgggccggctatgaagtcgacatcgacatgctgattgagctcgcagccaaaacaaatacggcgcttgaactgaatgcaaaccccgcgcgcctcgatttacggactgagcatctgatcaaagcaaatgaaaaaggtgtgactttggtcattaataccgatgcccataatatcgagatgctcgatgatatgaaaacgggcgtgaccgctgcgcgcaaaggctggacagagacaaaacatgtgttaaacgcccggccgttacatgaggtcaaagcatttctgacgcgcaatgattaagtaaggaggaccataaaaccgtgcagcaaaaagtgttatcatcacttgaatttcataaagtaaaagaacagattaccgcacatgccgcctcatcgctcggcagggagaagcttctgcagctgaaacctttgacggatctcgccgacatccaaaaacagctggatgaagtcgaagaagcatccgcggtcatgcgcttgcgaggccatgctccgttcggcggcctgaccgacataagatccgctttacggcgggcggaaatcggcagtgtgctgacgccggcggaattcaccgaattgtccgggctgctgtatgccgttaaacaaatgaagcattttatcagccaaatgacagaagacggcgtcggcataccgctgatacaggcccatgcagaagagctgattacattaggcgatttggaaagggagattaactcctgcattgatgaccatggtgaagtgcttgatcatgcgtctcccgctttaaggggaatccgcacgcagctcaggacgcttgaatcaagagtcagagaccggcttgaatcgatgctgcgttcatcttccgcttctaaaatgctgtctgacaccatcgttacgattcggaatgaccgctttgtcatcccggtcaaacaggaatacagatcaagctacggcggaattgtccacgatacatcttcatccggtgctacactgtttattgaaccgcaggcgatcgtagatatgaacaactcgcttcagcaggcgaaagtaaaagaaaaacaggaaatcgaacggattctccggatgctgacggagcatacggctgaacacacacaagaaatcgctcaaaatgtggaagtgctgcagacactggatttcattttcgccaaggcgagatacgcaaaagcaatgaaggcgacaaaaccattcatgaacggagacggctttatccgtctgaaaaaagcgcgccatccgctgctgccccaagatcaagtcgtggccaacgatattgaactgggcggagattattcaacgatcgtcatcacgggaccgaatacgggcggtaaaaccgttacgttaaaaacactcgggctgctgacgataatggcgcaggcaggattgcacataccggctgacgagggctcggaagcagccgtatttgacaatgtgtttgccgatatcggcgatgaacagtcgatcgaacaaagtctgagtacgttctcatctcacatggtcaatatcgtcaatattttaaaagacgtgtctgaaaacagtcttgtgctgtttgacgaactcggtgccggaacagatccgcaggaaggggcggcgcttgccatgagcatccttgacgaagttcaccggacaaacgccagagtgcttgcgacaacccattatccggaactgaaagcatacggatataacagacaaggcgtcatgaatgccagcgttgaatttgacattgaaacgctttcgcctacctataaacttctgatcggagtgccgggccgaagcaacgcatttgaaatctcaagacgccttgggcttccggagcatatcatcggccaggcgaagtcagaaatgaccgccgaacataacgaagtcgatctgatgatcgcatcgcttgaaaaaagcaaaaaaagagcggatgaagaactttctgaaaccgaatcactcagaaaagaagcagaaaaactgcacaaagagcttcagcagcaaatcattgagctgaatgcccaaaaagataaaatgatggaagaagccgagcggaaagctgcggaaaaactggaagccgccgcaaatgaagccgaacagattatccgcgagctcaggtccatcaagcaagaacacagatcctttaaggaacacgagctgattgacgccaaaaaacgtctcggagacgcgatgccggcttttgaaaaatcaaagcagccggaaagaaaaacagagaaaaaacgcgagctgaagccgggcgacgaagtaaaggtgctcacattcggacaaaaaggggcgctgcttgaaaaaaccggcgagaaagaatggaacgtccaaatcggcatccttaaaatgaaggtgaaggaaaaagatcttgagtttctcaaatcggctcctgaaccgaaaaaagaaaaagcaatcaccgccgtaaaagggaaggattatcacgtatcccttgaacttgacctcaggggagagcgttacgaaaacgccctcagccgcgtcgaaaaatatttagatgacgcggtgctcgccggctatccgagagtgtccatcattcacggaaaaggcacgggcgccctccgaaaaggggtgcaggatcttctgaaaaaccaccgcagcgtgaaaagctcgcggttcggggaagcgggagaaggaggatcaggcgtaacgattgtcgaactaaaataaaaagggagaaaacgtcatgaatgctttttgggaaaatgagcttgttgaaatcgcggcttattacagtgttgccgtcttgtgtctcgtcatttttctgaccgtgtttgaattggtgacatcctataaaaactgggtggaaatccaaaaaggcaatcttgcggtggcaatggcgaccggagggaaaattctcggtatcgcaaatgtctttcagcacagcatcgcccagcataattcgcttttgcaaatgatcggctggggcgtatacggatttattatgcttttaatcagctattttatctttgaatttctgacgccccggtttaaaattgataaagaaattgaaaaagataacagagctgtcggctttatttcatttgtcatctcagtcggcctgtcatttgtggtggccgccgggatttaaggggacggggaaaaatggagaagcttgcgaaagtgctgctgtcggcagcggggatttttctgttcatcggacttatttatctggtcatgacatcttaatactgaaaaaaggctgccgaactcaaatcggcggccttttttattgagaataccagtttatgcaggccgtatcagagcaaatgacggcttcccaattcatggcgcggacgacagactgaatgtcttgttcttccatgagaaagagtgtcgtaaaagaatcatatatgctcataaaagcggcgcgccgttttttcatcggcaatgatcatgtcagcccgcagcagtccgcatacatccgaagccgccgtttgattgagtgaaaataggcctttctcttcgacaggctcataataagtgcagcgctttatgccttttgaacggaacacatccaaaagtcccggaatcaaaaatggcgaagtgacatcatcgctcggcaagtacagatcgggatgatggagccgatttaaccgctcggcggattcaggatgtgcatattcctcccgcaatgccgtgacagcagtcataagcgcaagcgccgtttctttttcagaacgcaggccgcaaatgctcatgacggtttgccaggaaacgggtctgcccatcgcgatgatctcctcatcactcggatacatatgttcataaggccgtttgcgcttttgctcttcccgaccatctggcatccggacaaagggatggagcaaaaaggcggccgacgtaatcggcttcggcagctggcgcaggataggaactcccccttcaaaatgcagcgtttccagaaaactcaacacctcctgaaactcgaaatttcccatgaaacgctttcccattccaatcacccttctgctataataatagcgtataggaaaacagaagggagaggtattatgcagtctgaaaagccatggctttctcaatatcccgaagagattccgcatgagcttgaatttaccgatcaaaccctgccatccaatctgacaaactccgcagctcaattcccgaaccataccgccatttattttctaggaaaaaaactcacattccaagacgttctcacagattcattaaagcttgccgcttttttacgcaaaacaggcctgaaaaaaggtgacagagccgccattatgctgcccaattgtccgcagtcggtcatcgctttttacggcgtattgtttgccggcggcattgtcgttcagaccaatcctctctacacggaacacgagcttgagtatcagctgaaagacagtgcgccgcgcgtgatcatcaccctcgatatgctgtttccgaaagtgataaaaatgaaaacgttatcactcgtcgaacgcattattacaacaagtataaaagactttttgccgtttccgaaaaatatgctttatacgctcacgcaaaagcaacaggtgcatattgattatgacggctgcgaacaaattcacaaattagcggatattttaaaaaacgaaaaagcagaggaagcagagccatttgatattgaccctgcgcatgacatcgccgtgcttcaatacacgggcggaacaaccggctatccgaaaggcgtcatgctcacacaccgaaacattcaggccaatacagaaatgtgcgccgcctggatgtacaaaatgaaaaagggagccgaaaaggtgctcggcatcgtgcctttttttcatgtgtacggattgaccgccgtgctcaatttttccattatgcagggatgtgaaatgatccttcttcctaaattcaatcctttggatacactgaaaacaatcgacaggttgaagccgacggttttccccggggcgccgacgatttacatcgggctgctgcatcacccggagctgaataagtatgatctgtcctccattgaaagctgtccgagcggttcagcggcactgccggttgaggtcaaacagaaatttgaaaaagtgaccggaggaaagcttgtggaaggctacggattatccgaagcatcaccggttacccattcaaacttcatctggggaaaaaataaacccggcagcatcggctgtccctggcccaataccgatgcgggaatctattcagaagaaaaaggcgggcttgcggagccgtatgaacacggcgagctgatcgtaaaaggccctcaggtcatgaaaggctattggaataagcaggaggagacggcgcgtgtcatcagagacggctggctgtttaccggagatatgggatatatggatgaggaaggatttttctacatcgccgacaggaaaaaagacatcatcattgccggcggatacaacatttacccccgcgaggtggaggaggcgctttatgagcatgaagccgttcaggaaatcgtggtagcgggcgtccctgattcctacagaggggaaacggtgaaagcatttatcgttttgaaaaaaggcgccgaggcagatgccgatgagcttgatgcgtttgcaagagagcggcttgcgccgtacaaagtcccgaagctgtacgaattcagaaaagagcttccgaaaacggccgtcggaaaaatattaagaaggcgtttagtcgaagaggaagatgcttcccatgaaaacaaggtgccttaaaagaaaaacttgacaaaatccggattcctttttatcatgaagttatgaatgaatagtcattcatttatcgaaggaaggaacgatgacattgaaccaaaaacggccaaagtatatgcagattattgatgcagcagtagaagtcatagcggaaaacggctatcaccaatcacaggtgtccaaaatcgccaagcaggccggcgttgcggacggcaccatctatttatatttcaaaaacaaagaggatatactcatttctctttttaaagaaaagatgggccagttcattgaacgcatggaagaagaagtgaaagaaaaaacgacggcaaaagaaaaactcgctctcgttattaagcagcatttcacactgctcggcaatgaccgccacctcgcgattgtgacccagcttgagctcagacagtcgaatatcaagctgcgtctgaaaatcaatgatattttaaaaggttatttaaacatgctggacaccattttgaccgaaggaatcgagtcgggcgaatggaaagataatctcgacgtccgcctcgcccggcagatgatattcgggacgatagatgaaacagtgacaacatgggtgatgaacgatcagaaatatgatcttccggatttgtcagacaaggtattggagctgttggtgtcagggattcatcaaaactaaagggggttgacggatgaacagcctttcgatggcggtagaacaatctgttgcggtgatcaccattaatcatcagccggcaaacgcgctgtccggcgcggttttagatgagttgtccggtctgttcgaccgctgtgaaacagatgacagtgtcagaagcatcatcattcgcggagaggggaaatttttctcggcgggcgctgatataaaggaatttacgtcgcttgaaaatcttgagcaatcttctgccatggcggataaaggccagcagctgatggaaagaattgaagggtttccgaagcccgttatcgcagcgattcacggcgctgcgctcggcggcggccttgagcttgccatggcctgccatatcagaatcgctacattagatgcaaagctcggcctgcccgagctgaatctcggcattattccgggctttgccgggacgcagcggcttccccggtacgtcggtacggcgaaagcgcttgaaatgatcggcacttcagaacctgtaaccggagaagaagcgctcagcctcggtcttgtcacgataggcgccgaacatgaggaagagctgctgcaaaaagcgaaaacgctcgcgggcaagtttgcggaaaaaagcccgcagtcgatggcttttctgcttgagctcctttattcaaacaaggtctattcttatgacggcggcttaaagcttgaagcaaagcgctttggggaagcatttgcatcagatgacgcaaaagaaggcattcaggcatttctcgaaaaaagaaagcctcaattcggtgggcgaagataaaggggataagaatatgaatctatttgtactgatgaaacggacgtttgacacagaagagaaaatcgtcattgaagcaggaaagattcaggaggacggggccgaatttatcattaatccgtatgatgaatacgccattgaagaagccattcagctgaaggaagagcacggcggaaccgtgaccgccgtaaccgtcggcggagaagatgcggagaaagaactgagaaccgcccttgcgatgggctgtgaccaggcggtgttaatcaatattgaagatgatctgagcgatcctgaccaatactccgtttcaactatcttatatcattatttcaaggaccgggaatatgatctgattctcggcggaaatgtcgcgattgacggcggttccggccaagtggctccaaggcttgccgaactgctgaacattccttgcgtcacaacgattacaaaactgacaatcagcggcgatgaagctgcggcagagaaagacaacgaaggggataccgaaatcattaaaacctcacttcctttagtcatcacggcacagcaaggcttaaacgagccgcgctatccgtcgcttccgggcattatgaaggcgaagaaaaaaccgctggaagaacttgagctcgatgatctcggcattgatgaagatgatgccgcaccgaagctcaaaacgatcgaacgttttctgccgccgcaaaaagaagcgggcagactgatcgaaggagaagcctctgagcaggcgaaggagcttgtatcactgctgagaaaagaagccaaagtcgtataaactgatattaaagaaactgggggatgtcagaatgggaaaaaaagtgatcgtactcggagaaattcgtgacggcgccttacggaacgtcacctttgaagccatagccgcaggcaaaaccatttccggcggaggagatgtcatcggcgtgctgatgggaaagggcgcggctgatgcagcatcagaactcattcagtacggcgccgacaaagtatttacggccgattcgccggggctttctcagtatacggcggacggatatgccgcaattctcggggatttgatcgaaaatgaaaagcctgatgcggtcattttcggccacacttctatgggaaaagatttgtcacctaagcttgcggcccggtttgaaacggggctgatttcagacagcacagatgtaagcgttaccggagataacatcgtttttacaagaccgatctattccggcaaagcctttgaacaggtgatttcaaccgatcctttcattctggcgacaattcgtccgaataatattcaggcattagaaaaagacgcgaaccggacgggtgatattgaagagcttgcggcgcctccggcagatttgcggacggtcattgaagaagtagtcaaaaaaacggcggacggcgtggatttatcagaagcgaaaattatcgtagcaggcggccgcggtgtaaaaagcaaagatggatttgaaccgttaaaagaacttgccgaggtgctcggagcagcggtgggcgcttcgcgcggcgcatgtgacgcggactactgcgactattctcttcaaatcggccagacgggaaaagtcgtcacgccggatttgtatatcgcctgcggaatttccggagcgattcagcatttggcgggcatgtcaaacagtaaggtcatcgttgccattaacaaagacccggaagcggaaatatttaaaatagcggactacggaattgtcggcgatttgttcgaagtggttccgcttctgactcaggaatttaaaaatgccaatattcattcataatcaaaaccctctggcttatttgtcagagggttttggtttgtgttaattagttcgtacaaattatagattaataaaacaacagattgacatgtacgaaccaatgtaataagcttttgtaaagcgcttacaaacttatccatacagcatacatcccagatagatcggctgtagtgctttcattcttattaaggggaaggaatgatcaagtttgtctcacaatacggcagtcattcaaactgatatcacacggggaaccattaataaaaacatatacggacatttcgcggaacacctgggaagaggcatatatgagggcatctgggtcggaaaagattccgatattccgaataccggaggggtcaggacggatgtcgccgccgccctcaagcagcttcagattcccgtcctcagatggccgggcggctgttttgctgatgaataccattgggcaaacggcgtagggaaacgcaaaacaatgctgaatacccattggggcgggacgattgattctaatgaattcggcacgcacgagtttatgatgctttgtgaactgctcggatgcgaaccgtacatcgccggtaacgtcggcagcggaacggttaaagaaatggctgattggattgaatacatgacgtttgaagcgggcacgccgatgtccgactggagaaaagaaaacgggcgggaaaaaccgtggaagctgaaatatttcggaataggaaatgagaactggggctgcggcggaaacatgcatcctgagtattatgctggcctttacagaaacttccaaacctatgtccgtaattacagcggtaatgaaatctataaaattgccggcggcgcgaatgtcgacgattaccgctggactgaaactttaatgaaaaaagccgcggatctcatagacggactgagcctgcattattacacaataccgggcgacttctggaaggggaaaggatcagcgacggagtttacggaagatgaatggttcatcacgatgaaaaaagcggcgcatatggatgaattgatcacaaggcacagcgccatcatggatcagtacgatcccgaaaaaagagtcgggctgatcattgatgaatggggcacgtggcttgatcctgagccgggcacaaatccgggctttctgtatcagcagaatacgatccgcgacgcccttgtcgccgccgcgcattttcacatttttcatcagcacgcagaccgcgtacagatggccaatatcgcgcaaaccgtcaacgtgcttcaggcaatgatcctgacagaagggaaagaaatgctgttgacgccgacgtatcatgtgttcgatatgtttaaggtgcaccaggacgcatctcttttggcggcagaaacaaatgcagccgggtacgaatggaatgacggccggctcccgcaagtcagcatttcagcgtccaaacagcagaacggagacatacatatcagcatttgcaatatcgatcatctgcacaaagctgacgtgaagattgaactgcggggcatgaaaaagacagggacgccttcgggaacgattctgcacgcggaaaaaatgaatgcccacaatacattcagcagtccggaaaacgtcaaaccgaagccgttttccgggtttgctcaaaagggaggaaaacttgaggcggagcttcctccgatggcgattgtattaatcacgctgcctgcaggtccatcttaagttttgaacgcccgccgcccggttataatacactgtataaataagattatttccggcgggttcgggggaaaataatataagcattaaattagcatgaacgaatgggagatgctatactaaaaatcatcatttgacaattggaggaataacaaatggctatcgtaaaagcaactgatcaatcgttctcagctgaaacaagtgaaggtgtcgtattggctgatttctgggctccttggtgcggaccttgtaaaatgatcgcgcccgttcttgaagagcttgatcaagaaatgggagacaaactgaaaatcgtcaaaatcgacgtggatgaaaaccaagaaactgccggtaaatacggcgtcatgagcatcccgacacttctcgtgctaaaagacggagaagtcgttgaaacatctgtcggcttcaaaccgaaagaagctcttgaagagcttgtaaacaaacatctgtaagccgaaagcttccgttacggcagggcgattcctttgaaaggggtcgcctttttttgatcttccaaaagctgagaatggagaaaaacaaatgttcgtgatacactgaatggacacgagaaatgaatgtaaggaagggtaacgtatggataaacaactgaaagaaaagctggccctccttcccgatcagccgggctgttatttaatgaaagaccgtcagaaaacagtcatctacgtggggaaagcgaaagtcttgaaaaacagggtgcggtcttatttcaccggttctcacgacgcgaaaacccaacggctggtgacggagattgaggactttgaatatatcgtgacttcctccaatcttgaagcgcttattttggaaatgaatctgattaaaaaatacgatccgaaatacaatgtcatgctgaaagatgataaaacctatccctttattaaaatcacccatgaacgtcatcctcggctgattgtcacccggaatgtcaaaaaagacaagggacgctatttcggcccgtatccgaatgtgcaggcggcgcgggaaacgaaaaaactgctggaccgcctttacccgctcaggaaatgctcaaagcttccggaccgcgtctgtctttattatcatctcggccaatgcctcgccccatgtgtaaaggatatatctgaggagacaaaccgcgagattgttgaagacatcacccgttttttaaagggagggcataacgaaatcaaaaaagagcttgaagcgaaaatggcagaagcggccgaaaagcttgaatttgaacgggctaaagaattccgcgaccagcttgctcacatcgaatcgacgatggagaagcagaaaatgaccatgaatgaccttctggaccgcgatgtgtttgcatatgcctacgataaaggctggatgtgcgttcaagtcttttttatacgccaaggaaaactgatcgaacgcgatgtcagcatgtttccgatgtatcaggaagcggatgaagagtttctgaccttcatcggccagttctattccaaaaacaatcactttctgcctaaggaaattctggtgcctgacagcgttgacagggacatgattggcgagctgttggaaaccgccgtgcatcagccgaaaaaaggtccgaaaaaagagctgcttttgcttgcgcacaaaaatgcgaaaatcgccctgcgggaaaaattctcgttaatcgagcgggatgaggaacggtcaatcggtgcagccgaacggctcggcgaagcactgaatatttacacgccgcatcggattgaagcgtttgacaactccaatattcaaggcacaaaccccgtatcggccatgattgtctttattgacggaaaaccgaataaaaaggaatatcgcaaatataaaattaaaaccgtaacagggccggacgattacggctcaatgagggaagtcgtcagaagaagatacacgagggtgctccgcgaaaatcttccgctgccggatttaatcatcattgacggcggaaaagggcagattaacgcggcgcgcgacgtgctcgagaatgagctcggccttgatgtcccggtagcgggactggcgaaagatgataaacaccggacatcgaaccttttgatcggcgacccgcttgaaccggtgtttctggagcggaacagccaagagttttacctgcttcagcgcattcaggacgaagttcaccgttttgcgatcagctttcacagacagatccggggaaaaagcgtctttcaatccgttctggatgatatccccggaatcggcgaaaaacgcaaaaaaatgctcttaaaacatttcggatctgtcaaaaagatgaaggaagcaagccttgacgatatcaaaaaagccggtgtgccggccgcggcggcccagttgctgtttgaaaaattaaaaaaatagtattgtgcttttctgaaaaatctgctagaatgtgaactaatttcataagatcgtgttatatggtgaagatagaggtgcgaacttcaatagtaagcctttggagaatgatggattctgcgaaaaaggctgaaaggggagcgtcgccgaagtgtgtcacatcccatcggtgtgatttgctggccttgcattaaataaatgtaaggctgtcaagaattcattttcttggagggctatctcgttgttcataatcaatcgtactgatatgaaaagcaatgagagctattcctctcattgctttttttattgtggacaaaacgctcttttctcctcacccgcacgaaccaaaatgtaaagggtggtctagtatgggtcttatcgtacaaaaattcggaggcacttccgtcggctctgccgaaaaaattcaaaatgccgcaaatcgcgccattgctgaaaagcaaaaaggccatgatgtcgtagtcgtcgtttcggcaatgggaaaatcaaccgacgcgctcgttaacctcgcggctgaaatcacatctgaaccaagcagacgcgagatggatatgcttttgtctacgggggagcaggtcacgatttcgcttttggccatggcgcttcaggaaaaaggatatgacgccgtctcttatacgggctggcaggcgggtgtccgcacggaagccgttcacggcaatgcgagaattacggatattgatatcacggcgattcgttcgcagcttgcagaaggcaaaattacagtcgttgccggttttcagggcgtaacggaagacggcggcatcacgacgctcggacggggcggttctgataccacggcggtcgctcttgcagcagcgctggaagcggataaatgcgacatttatacagatgttccgggcgtatttacgacagatccgcggtatgtccggtcagcgagaaaactggcggggatttcttatgatgaaatgctggaacttgcaaatctcggagcgggtgttcttcacccgcgggcggttgagttcgcgaaaaactaccaagtgcctttagaagtgcggtcaagcacggaacatgaagccggaacattaattgaggaggaatcatcaatggagcagaatttaatcgtcagaggaattgcatttgaagaccagatcacaagggtgtccgtcacgggccttgcaagcggactgacaacactttcaacaatcttcaccgcgctggcaaaacgaaacatcaacgttgacatcattattcagacacagtcggatgatggggaagcggatatttctttctcagtgaaaacggaagatgccgcccaaacggtcgccgtgcttgaagaatataaaaacgcgcttaactatgaaaaaattgaaaccgaaagaaaactggcgaaagtctccattgtcgggtcgggcatggtttcaaatcccggcgtcgccgcggacatgtttgccgtactggcggaaaaaaatgtacaagtcaaaatggtaagcacatccgaaataaaagtatcagcggttgtcagcgaaaatgatatggtgaaagcggtcgaagcgcttcatgatgcgtttgagctgtctaaacagccgtctgccgtataaacgggcaggcaaaaaggcgggacttttgagtcaccgcctttttcaattatacagggtccttcatatcccattttacagtcaggacgactttatccgctctcttttttacctgttcataagattctgcaatctgatcgttcatcaattgaatctgttcggctataaaaccggcttcaagctggaaacaaggctctttctgatgtttgagcctgctggatacgagcggtccttccagttcaaattccagttcttgttttttcgatcctgcgtttgtcaaagttccccagccggctttttcaaaaaaggcggggatttcttcccacgattgaagaggaaatttgcgggcgaggcgttttcccgcccaatacatcatcgatgaatgatccggaccgaggatatccggaagcacgatttcccggattaattcgtagccgtatgcgctgacgtcgagttcagttaaaggttctaaagctgcttcataattattcttcatattatgtattcccctctctccttcgtttattatagcttaaacaggggggaggattacaggatgatcctataaaacacgcgaaaaaatgtgagaaagatatcgcaggaaaataaaattttccctccagataatcaattccgaaaattataatttatgtacacgttttcttgacgcccttttgagggaggagtaaaatgaaattgtcaataaattttaataaagtgcttacaattgaaacgaagtgggggcagagattttagtacatttcgcacttaaatcaaacagggggtaaagtaatgtctgggaacagagagttttattttcgaagattgcattccttgctcggtgttattccggtcggcatctttttgatccagcatttagtcgtcaaccaatttgccgcaaggggagcggatgcgtttaacaaggcggccggctttatggacagtctgccgttcaggtatgcgttagaaatttttattattttcttacctttaatttatcatgcggtttacggtgtgtacatagcatttactgcgaaaaacaacgctggccactacagttatttcagaaactggatgtttgtgcttcagcgtgtcactggtattctcacccttattttcgtcagctggcatgtgtggcagacgcggattgccgcgcagatgggcgctgaagtcaacttcgatatgatggcgaatattctgagctcgccgtttatgctcggtttttacattgtaggcgttttatcggtcattttccacttttcaaacggcttatggtcttttgcggtcacatgggggatcacggttacgccgcgttctcaaagaatttcgacttacgtgacgctgattatatttttagcgctttcatacgtaggtttaaaagcgatttttgcgtttgtgtaagagaactagattactagagggagaggggctatcatgagtcaatcaagcattatcgtagtcggcgggggtctagccggcctcatggcgacaattaaagcagcggaatcaggcacggccgttaaattgttttccatcgttccggtcaaacgctctcactcggtctgcgcgcagggcgggataaacggagctgtcaacacaaaaggggaaggagactctccgtttgagcattttgatgacacggtatacggaggcgactttttggcaaaccagcctcctgtaaaagcgatgtgtgaagcggcgccgtccattatccacttattggaccgcatgggggttatgtttaacagaacgccggaagggctcttggacttccgccgtttcgggggtacacagcatcacagaaccgcttacgcgggagcgacgacgggtcagcagcttctttacgcactggacgagcaggtgcgcagatatgaagtggcgggtctcgtcacaaaatacgaaggctgggaattcctcggcgccgttcttgacgatgagcgcacgtgccgcggtatcgtagcccaaaatctgaccaatatgcaaatcgagtcattccgttctgacgccgttattatggcgacgggaggacccggaatcgtattcggaaaatcaacaaacagcatgatcaatacgggatctgccgcatcaatcgtctatcagcagggcgcttattatgcaaacggcgaatttatccaaattcacccgacagcaatcccgggggacgataaactgcgtctgatgagtgaatcggcgcgcggcgagggcggtagagtctggacgtacaaagacggaaaaccttggtacttcctcgaggaaaaatatccggcttacggaaacctcgtgccgcgggatattgcgacacgtgaaatctttgacgtgtgcgtgaatcagaaactcggcatcaacggagaaaacatggtgtatctcgatctgtcgcacaaagatccgaaagagcttgacgttaagcttggcggcattatcgaaatctatgaaaaattcatgggcgatgacccgcgcaagcttccgatgaaaattttccctgccgttcactattcgatgggcggactgtgggttgattatgatcagatgacaagcatccgcggactgttcgcagcgggtgaatgtgattattcaatgcacggaggaaaccgtttaggggcgaactctctgctttccgccatctacggaggaatggtggccggaccgaatgcggtgaaatatgtttccggacttgaaacatcagcggaagacctgtcttcttcattatttgattcctatgtgaaaaaagaagaagaaaaatgggccgatatcatgaagatggacggcgatgaaaatgcctacgtgcttcaccgtgagctcggagaatggatgacggccaacgtcacggtggtccgccacaacgacaagcttttgaaaacggatgacaaaatccaagagctgatggaacgctttaagaaaatcaatatcaacgatacgacaaaatggagcaaccaaggggcgatgttcacccgccagttctccaatatgcttcagcttgccagagtcatcacgctcggcgcatataaccgaaatgaaagccggggagcgcactataaaccggatttccctgaaagaaatgacgatgagtggctcaaaacgacgatggctaaacatgccggtccgtttgaagctccggaatttgaatatcaggatgtcgatgtatcactgattgcgccccgtaaacgcgactactcgaagaagaaggtggcgaaataatcatgagtgagaaaaagatacggtttatcattacacgccaggatacgcccgaaagcgcgccatacgatgaagaattcgaaatcaattaccgcccgaatctgaacgtgatttccgccctgatggaaatccgcagaaatcccgtgaatgcaaaaggagagaaaaccactccggtcgcatgggacatgaactgtcttgaagaagtatgcggcgcctgctccatggtcatcaacggaagaccgcgccagtcgtgtacggcgctgattgataagctggaacagccgatccgtctgaagccgatgaaaacattcccggttgtccgtgaccttcaggttgaccgcagcagaatgtttgattcactgaaaaaagtgaaagcatgggtgccgattgacggaacttacgatttggggccggggccgagaatgccggaaaaacgccgccagtgggcatatgaattgtctaaatgcatgacatgcggcgtctgccttgaagcctgcccgaacgtcaacagcaagtcgaaattcatggggcctgccccgatgtcacaagtgcgtctgtttaatgcccatccgacgggcgcgatgaacaaagcagaacgtttagaagctttaatgacagacggcggcctcggagattgcgggaattcacaaaactgtgttcaatcctgcccgaaaggcattccgcttacgacttcaatcgctgctttgaacagagataccaatttacaagcattccgtaatttcttcggaagcgacagagtataagaaagagaaaaagagcctcttccgcacgggagaggtttttttataaggagctgaaggtgatgaaacaaccgcaatatattgatatcccgtttgaagaatggagacagtcgttttctttctttactgaagtatcggttcgtttttcagaaacggatatgttcggccatatgaataatgtaacccctttcatctattttgaagaagcacggatcgcttattttaaacagcggggcatgacggcgcaaaactcggaaacgatgacggtcgtcgcaagccagcagtgcgactatatgcgtcaggtgatgccgtatgaaaatctgcggatttatgtgaaagcaagcgctgccggaaatgcgtccgtcacccttcattaccttggagaaaatgagtcgggcctgccgtgctttacaggttccgtcgttatggttcaagtgtcgaaaaaaagcggcaaagcggtcagctggacggagcgggagaaaggcattctgctcgcctgaacggataactatttctctaagagacgtcacctccgaagcgccctttacatatgatatcttgactatataaacccattcgtttcagattcgctctcaccttagcaaggagggttacaatacttgaaggagaaagattttcaatcaaagccgctgctgaccaaaagagaaagagaagtattcgaattgctcgttcaagacaagacaacaaaggaaattgcaagcgagctatttatcagtgaaaaaactgtacggaatcacatttcaaatgccatgcagaagttaggtgtgaaagggcgttcgcaagctgttgtcgagcttcttagaatgggtgagctagagctctgattcttgccggttttccttctttacgagaaggagccggttatttgcgttggcgcccgggctgatgggcatgcggtgaaaatcccggtttttcctttttctccgtcagtcttgcattttcttaaaaaaagaaggaaaatagacacggagcgcatagcccagaaagatccttgagtgagggatggacaaatgacatcaaaatctgtagagcatgttgcggatatcgaaaaatcactccgccatatcgctgcgatcattaaacaaaaaggaagagaaatccttaaccaatatgcaattacaccgccgcaattcgtggggcttcaatggctttatgaattgggggatatgacaataggcgaattatcaggcaaaatgtatttggcttgcagcacgacgacggatctgatagaccgcatggaaaaaaataagcttgtcgagcgggtcaaagacccggctgacagacgggtcgtcagaattcatcttctcgctgaaggagagcgcattatccaagaagtgattttgaaaagacaggcttatttgcgggatatgtttgcgacattttccgaagaagaaacagccgctttcgaaaaatcattattgaaactgcagcatgaaatgaaaagaaaatgaggcgattttgttggaacagccgataggagtcattgattccggggttggcgggttaaccgttgctaaggaaatcatgagacagctaccgaaggaaaatatcatctatgtgggagatacaaaacgctgcccgtacggcccgcgtcctgaagaagaagttcttcaatacacgtgggaaatgaccgattacctgctggaaaaccaccatatcaaaatgctcgtgatcgcctgtaatacggccacggccattgccttggaggatattcagcgcaaaacggatattccggttgtcggcgtcattcagccgggtgcgagaacggcgataaaggtcacgaaaaaccagcatatcggcgtcatcggcacggtcaataccattaaaagcagagcgtatgagcaggcgctgctcgggttaaacgcagaacttcaagttgagaacacggcttgtccgctgctcgtgccgtttgtggaaagcggacggtttcttcaggaatcagcggaggaagcggttgaagcatcgcttgaacctttaaaaggtacatcaattgacaccttgattttaggatgtacgcattatccgatcttaaaagacccgattcagaattatatgggagagcatgtgaaaatcatttcctccggagacgagacggcgagagaagtgagcaccatcttgtcttataaaggtttgttaaaccaatcgaaacatgcaccggagcatcaatttcttacaacgggagagcggaacggcttcgcaaaaattgccgaagactggttcggccacgaaatcggccatgtcgagtgcatctcccttcaagagccggtcagaaaataaatcaaaaaaaccccgctgtttacagcgggtttttttgcgcttcccggtctatttcccggacagggctcgtatacatcatagtacaaacagccttaggagggaaaagtatgctgaaaaaaggacctgcagtcattgctgcaacatgtcttacttcggcttttgtgttatctggatgcggtttgtttcaatccgataaaacagccggggaaattgacccgcctcaagacatttcatatgtaaaggatgaagcgggaattcaggcaaaaccaaagcagtcagagaaaaacggcacttctaaagccgaccagccggccaatacagtcatgcgagaactgtatctgattgataaaaacggctatgtcgcagcacagacactgcctcttccgaacagtgagggaaccgcaaagcaggcccttgagtacttggttcagggagggcctgtatcagaaatcctgccgaacggcttcagagcggtgctccctgcggatacgacggtaaatgtcgatattaaaaaagacggcactgcagtcgctgatttttcgaaggaatttaaaaactataaaaaagaagacgaacaaaaaatcctgcaatcgattacgtggacgcttacccaattcagctcaatagataaagtcaaaatcagaatcaacgggcacgaactgaaagaaatgcctgtgggcggcacgccgattacgggcgacttaagcagaaaagacgggattaatattgaaacggccggagtgaatgatctgacagacacccatccgctgactgtatattatctggcggaaacagagacaagcgaatactacgtgcctgttacaaagcggattgacaattcggaaacaaatgacatcaccgctgccgttgaacagctcaccgacggaccgggcaaagcaagcgggcttttgacggactttaataacgatgttaagcttctcagcaagccgaaagtgaaagacggccaggttacactggactttaacagctctatttacggaagcgccgacgaaaaaacaaaaatggtgtcatcgggcgtactggacagcatcgttctcacgttaaccgaacagccgtcgattaaaagtgtttctataaaagtaaacggaaaatcagaactggtgaatgaaaaaggagaatccctttcaaaacctgtttcgaggccggcacaagtgaatacgggtagtttttaatttgcgatttttgatatactagtaaaaaagaggttagcgttccggctgcctctttctttattcacaatccggaacaaaaggtttatgtacatataatcggaggtaaaatatgagacacgacggaagacagcacgatgagctgcgccctatcacatttgatttggattttatcactcacccggaaggctctgttttaattacagcgggaaatacaaaggtcatctgtaatgcatctgtggaagaccgggtgccgccatttttacgcggcggaggaaaaggctggatcacagcggaatacagcatgcttccccgcgcgacgaatcaaagaacgataagagaatcttcaaaaggaaaggtctccggcagaacgatggaaattcagcggctgatcgggcgcgcgctccgggccgtcgttgatttggagaagctcggcgaacggacgatctggatcgactgtgacgtcattcaagctgacggcggaacaagaacggcttccattaccggcgcattcttggcaatggccattgcgaccggcaaactcgtaaaaagcggcgttatcaaaacctctcccgtgacagattatctcgcggccatttctgttgggatggataaagaagaaggccttcttttggatctgaattatgaagaggattcggcggctgaagtcgacatgaatatcatcatgacgggaagcggacgttttgtagagcttcaagggacgggcgaagaagccacattctcccgtgaagatttaaacggactgttaagccttgccgaaaaaggaatccagacgcttattcaaaagcaaaaagaagtgctgggagaaacattgcctgaactgaaataagaaagagaggcctgatcagcgtgaaagaagtcattattgcgacacacaatcagggaaaagtgaaagaattcaaggaaatactcgaaccgaaaggctacagcgtctcttctttggcggaaatcggatttacggaagaaattgaggaaaccggacatacctttgaagaaaacgccatcttaaaagcggaagccgtggcaaaagccgtcaacaaaatggtcattgcagacgactccggtttatcagtggacaaccttggaggcagaccgggcgtttattcagcccgttatgccggagaagcaaaagatgataaggcgaatatggacaaggtgctgtcagaattaaaaggcatcgaaaaagagcagcgcacggcccgtttccgctgcgcccttgccgtcagcatgccggggcaggaaacaaaaacggtcgaaggtcatgttgaagggtatattgcagaaggacccgaaggagataacgggttcggctatgatcccatttttattgtaaaagataaagataaaaccatggcccagctgacaagcgctgagaaaaacaaaatcagccacagggctgaggcgctcaagaaactgtcaaagctgcttgattcataagggggagcgtatgcaatgaaagtgctgataataagtgacagtcacggccttgaagacgagctggagacgattgcaaagcggcacgaagacgaagcggatctgatgattcattgcggtgattcagagcttgacgccgcacatccggcactcacgccgtatcacaaggtgaaaggcaattgcgactttggcggcgggtttcaggatgaactccttctggatgccggttcaaagaaaattctggccgttcacgggcatcttcacggcattaaacagtcacttttaactgttttttaccgggcggaagagcttggggcggatatcgtctgcttcggccattcacatattgcggggagtgaagtgcttcggggcaagcttttgattaatccgggcagcatccgtcttccgagagtccgcaatgtgaaaagctatgccattcttactcttacagaaagagaaggcgccgtgacattttacgacgaaacgggtcgggaattgaaggacttggggaatacaatcagtttttaacaagtgatgggggagatttcattcttccccatcaaaagttttttaaaaaatattgacttatgatttgaacctgtatataataaatcttgtcgctgatacataaagcaaaagctgtcccagtagctcagctggatagagcaacggccttctaagccgtcggtcgggagttcgaatctctcctgggacgtacaaaaaaagagctggtgacatcagagtgaaaactgatgccgctggccttttttatcggatgactatattgtcaattcactgatatcatggtaaaataatcagcagatatttgtttttcatgtcccagtagctcagccggatagagcaacggccttctaagccgtcggtcgggagttcgaatctctcctgggacgtataaaaaacctcaagccctgacaatgggtttgaggtttttttgtattttatttttagttttacgaaacaaaagttccgtatttgatgaaaattgtaaagtaattttaatgtaaatgaaacttaatgtaatatttaccgtaataaatatatgtataaagatacttaaggcgcccttgagtgataaattatctgatttctatcatacgttttgttgatgattgatagaaagacagcaggaggaattagcttttgaagtacgcatttgcatataaaaatcacaatatagaaacgatcttttgcggaaaagacgagctgtttgaggaactgaaacaatttttaatcactcaatgcggtttaatcattgttgaggtttcaagggctgattactatacggagcaggaaatgaatcagtggaatgaacgttatactctgtgaataagaaaagaaaccggccgtgtgagaccggtttttgtatcatctgaatccgctcggagcgctgaagcccccggcatggccgctgaaaccgccaccgagcgcgccgggatgtgccccggcgccgaggcttccgccgacgtcactgaaggtttggccgtagtacccggatgtataagggtacggaacgaattgctgtccggcgaatgacagtgtgctttgcggggtctgctgtccgtatccggatggcggaaatccctgctgaaaagaagggccgccttgatatggtgctgtatgcatcggggccggaggatagtaagactgcggcggtaagaccggtaaaggcggaaatccaggaggcaggccctgcatgcctgataacatcttattcatgacatcactcatttcttacgagataagaacagtgtatgcgtatgtctgtataaagagcctgttcaatcgaacggaatatctgacaagcatgccggaaggacagagaaaaatcgcgtaataaaatgtgacatattcgtatatgaacggaaaaatttcatgtaatcttgagagattaataaaaaaaatataaaaacttttaacatttgccgatccttttatatcagtaatgaaagcgtatacaaaatagattgattaatctaaattgtctaataattataaaaatgctgttgacactgtctgcaaacgggcgtaatatgagttcaaacaaaaataaataaatgattcacactaaaaagaaaaatcataaaacactgaaaaaacaaacaaatgaaggttcttttttaataaaagagctgccataataaaaagcgcagaagaggataagtagctttgctgaagtttttcacagagagccggtaacgctgagagccggtaaaacaaatcaaagtgaactcccctcagagtgccggtctgaaatgtaaagagtaggactcggccgagtgaacgcaatgtttactcgttatcaaaacggataatcattatccatgagacggtctgcatatgaccgtaaacaagggtggtaccgcggagagcaaagccttttcgccccttttggctatcgcatgaaatgcttggctgaatgtgggtgggaaggcttttttatttgcgtcagccggcgctgcgttttatgaattggattttagaagggaacattgaaaaggaggaactgaaaatgggcacaaatgtacaggcggattctttgtctgccgattgtacaaaaacaatgaacggggctctgatgctgattgaatcattaaagaaagaaaatgtcgagatgatcttcggctatccggggggagccgtccttccgatttacgataaactgtatcaatcaggattggttcacatcctgccccgccacgagcaaggcgcgattcatgcggcagaagggtatgcgagagtctccggaaagccgggggttgtgattgctacctccggacccggagcgacaaatttagttaccggtcttgcggatgcgatgattgattcactgccgctcgtagtgtttaccggtcaggtcgccacttcggtcatcggcagcgacgctttccaggaagccgacattttaggaattacgatgccgattacgaaacacagctaccaagtccgccgtccggaagatctcccccgtgtgattaaagaggcgttccatattgccacgacgggaagaccgggcccggtattaattgatataccgaaggatgtcgcagcatttgaaggagaattcagatatgatcacgagatcaatcttccgggttatcagccggtaaaagagcctaactatctgcagatccgaaagctcgtggaagctgtcagcagtgcgaaaaagccggttattttagccggagcgggtgttttgcacggtaaagcttcagaagatttaaaaaattatgccgaacagcagcaaattccggtagcgcacacgcttctcggtctgggcggtttcccggcagaccatcctctttttctgggaatggcggggatgcacggcacatacacagcgaatatggcgctttaccactgtgacttgctgatcagcatcggagcgcggttcgatgatcgcgtgaccggaaatctgaagcattttgcaaaatcggccaaagtagcgcatatcgatattgatcctgctgaaatcggaaaaattatcgaaacgcagattccggtggtcggcgacagtaaaatcgtccttcaggaattattgaagcaaaacggaaaacagggacagacagaggaatggaaacagcagctttcagaatggaaagaagaatatccgctttggtatacagacgacagagaagagggcttgaaaccccaaaagctgattgagtatattcaccaattcacaaacggtgaggcgattgtggcgacggatgtcggccagcaccagatgtgggcggctcagttttatcctttccgaaaggctgataagtgggtgacctcgggggggctcggcacaatgggcttcggccttccggcggccatcggagcgcagctggccgatcgtaacgccacggtcgttgccatcctcggagacggcggttttcagatgacccttcaggaattagatgtcatccggcagctgaatcttcctgtcaaagtggttatcttgaacaacgaatgtctgggcatggtcagacagtggcaggaaatcttctatgaagaacgctattctgaatccaaattctcggcgcagcctgactttgtcaaattgtcagaagcctacggcattaaaggcgttcggatttcatcggaagaagaggcggaagaagagcttaaaaaggcgctttcatcaaaagaaccggccgttattgacgtccgggtcgccaaaagcgagaaagtattcccgatgatcgcgccgggtaaaggacttcatgaaatggtgggggtgaaaccttgaaacgcattatcacattaacggtggtcaaccgctcgggggtattaaaccggatcaccggcctgtttacaaaaagacactataatatcgaaagcatcactgtaggccacacggaaacaagcggtgtttcaaggattacatttgtcgtccatgtggaaggcgaaaatgacgtagagcagctgacaaagcagcttaacaaacaaattgacgtcctgaaagtgacggatattacaaaccaatcgattgtacagcgtgagctggcattaatcaaagttgtttccgcaccgtcggccagaacggaaatcaatggaatcattgagccgttcagagcttccgtcgttgatgtctcaagagacagcatcgtcgttcaggttaccggcgaatctaataaaatcgaagcgctcatagagcttctcaaaccttacggaattaaagaaatcgcgagaacgggcacaacggcttttgcgaggggaacccagcagaaggcgtcatccaataaaacaatttcaattgtataacacaaaaaagggagagattaaaatggtaaaagtatattataacggtgatatcaaagagaacgtattggcaggtaaaaaagtagcgattatcggttacggttcacaaggtcatgcacacgcgctgaacttaaaagaaagcggaattgatgtcattgtcggcgtcagacaaggcaaatcatttacacaggcccaagaagacggtcataaagtcttttcggtaagagaagcggctgcccaggctgatatcattatggttcttcttccggatgagcagcagcaaaaagtatatgaagctgaaatcaaagatgaattgacggcgggcaagtcattggtattcgcacacggatttaacgtccatttccatcagatcgtgcctcctgctgatgtggatgtattccttgtcgcccctaaaggacctggacaccttgtcagaagaacatatgaacaaggcgcgggcgtaccggcattgtttgccatctaccaggatgtatcaggcgaagcgaaagatacggctcttgcttatgcaaaaggaatcggcggagcgcgtgcgggggttcttgaaacaacatttaaggaagaaacggaaacggatttgttcggtgagcaggctgttctgtgcggaggtttaacggcgcttgtcaaagcgggttttgaaacgctgacagaagccggctaccagcctgaactcgcatacttcgagtgtctgcacgaactgaagctgatcgtagacttgatgtatgaagaaggattggcgggcatgagatactctatttccgatacggctcaatggggagactttgtatcaggaccgcgcgtagtcgatgcgaaggtaaaagaatcgatgaaacaagtattaacggatattcaaaacggtacattcgcaaaagaatggatcgtggaaaaccaagtgaaccgtcctcgtttcaatgcgatcaatgcaagcgaaaacgagcatcagattgaaaaggtcggcagacagcttcgtgaaatgatgccgtttgtcaaacaaggcaaaaagaaggaagcggtggtctccgttgcgcaaaattaatgttttcgacacgacccttcgtgacggtgaacaatctcccggggtcaacctcaattcccgggagaaactggcgatagccaagcagcttgaaagactcggggtggacattattgaagcgggatttcccgcttcatcccgaggtgattttttagccgtgcaggaaatcgcaagaacgattaaaaattgttcggtaacagggcttgctcgatctgtcaaaggtgacattgacgcagcctgggaagcgctgaaagacggggtcagcccgcgcattcacatctttatcgccacctctgacattcatctgaagcataagctgaaaatgacgcgggaagaggttaaggaaaaagcggttgaaatggtgaagtatgcaaaagaacgctttccgatcgttcaatggtcggcagaagacgcatgccgcaccgaacttccgtttctggctgaaatcgtagaaaaagtgattgatgccggcgcgagcgtcatcaacctgccggacactgtaggttacctgacgcctgctgaatacggaaacatctttaaatatatgaaggaacacgttccgaatatcagccgggtaaagctctctgcccattgccacgatgatctcggaatggcggttgccaactcactttcggcaattgagaacggcgctgatcaaattgaatgcgccattaacggcataggagaaagagccgggaacgccgcgctagaggaaatcgccgttgcgcttcatgtcagaaatgacgcgcatcaagccgattcatctctcaatcttcatgaattgaagcggacgagtgatcttgtcagcaaactgacgggcatggccgttccccgcaacaaagcaatcgtcggagataacgctttcgcacatgaatccggcattcaccaagacggtttcctgaaagaaaaatcaacatatgaaatcatttcaccggaacttgtcggcgtgactgctgatgcgctcgtactcggaaagcattccggacgccatgcgttcaaagaccgcctgaatgcgcttggattccagtttgatagtgaggaaatcaataaattttttacgatgtttaaagaactgaccgaaaagaaaaaagaaatcaccgatgatgacttgatttctcttattttagaagaaaaagtgacggacaaaaaaatcggctatgaatttctgtctctgcaagtgcattacggaacgtctcaggtgccgactgcaacagtctctttgaaaaatcaggaaaacgaacagctgattcaagaggcggcaacgggggcgggcagcgtagaagccgtttataatacgctcgggcgctgcatcgataaaaatattgaactgacagactaccgcatccaatccaaccggaaaggcgaagacgcgctggctcaagtttatgtcagagtgaccgtgaacggaaaagaaacatcagggcggggaatcgcgcaggatgttctggaagcttctgctaaagcttatctgaacgccgtgaatcggcagttggtgctggattgcaatttagacggattaaagagacggactgcggtcggctcgtaatagaaaggagaacgtttgatttgaaaaaacgcattgctttgcttccaggtgacggaatcggaccggaagtggcggaatcagcggcagatgtattgaaaagcgttgctgaacaattcggacatgaatttgaatttgaaaacgggctgatcgggggagcagcgattgacgcccatcaaaacccccttcctgaggagacggtggctctttgtgaaagatccgacgccatcctgctcggggcagtcggcgggccgaaatgggaccaaaaccctccggagctcagaccggaaaaaggcctgctcggcatcagaaaaaagctcggcctgtttgccaatctgcgtcctgtgaccgtatttgaaagcctgtctgaggcgtctccgctgaaaaaagaatatatcagcggcgtcgactttgtaatcgtcagggaactgacgggcggcctctacttcggagaaccgagcagacagtatgtcaatgaagcgggagaaaaggaagcggtcgatacccttttttataagaaagaagaaatcgcacgcgttgtcagagaagcctttaagatggctgccggcagaaaaggaaaagtgacgtccgttgataaggcgaatgtgctttcttcaagcagactgtggcgtgaaacggcagatgaaatcgcaaaagaatttcctgatgtgacgcttgaacatatgcttgtcgataatgccgcgatgcagctcatctacgctccgagccagtttgacgtcatcgtaactgaaaatatgttcggcgatattttaagcgatgaagcctccatgctgacaggctcgctcggcatgctgccgtcagccagtttatcaagttcaggtcttcacttgtttgaacccgtgcatggatctgcgcctgacatcgccggtaaagggatggccaatccgtttgcggcgattttatcagcggcgatgcttttgagaacatctttcggacttgaaaacgaagcgcaggcggtggaaaaggcggtcgcaaaggtgcttgcagacggcagccgtacacgtgatatcgcccgggacggccaatatgccggaacgcatgacattactgaaaaagtaaaagccgcattagccggctcgaatacaaaatctatagtatgacgctttaaagaaagcggtcttagttcaataggtagagggaggaaacaaagatgatgcctcgaacaatcatcgaaaagatttgggatcggcatgttgtaaaaagcggtgaaggaaaacccgaccttctctatattgatctgcacctcattcatgaggtgacgtctcctcaggcgtttgaagggttaaggcagaagggaagaaaggtcagacggccgcagaacacgttcgcgacgatggaccacaatattccgaccgtcaaccgttttgacattaaagatgaagtcgcaaagcgccaagtaaccgcgcttgaacggaattgcgaggagttcggcgtccgtcttgcggatcttcacagcgcagaccagggaatcgttcatgtggtcgggcctgagcttggtctgacacttccgggaaaaacgatcgtttgcggagacagccatacatcgactcacggcgcgttcggagcgcttgccttcggtatcggcacaagtgaggtggaacatgttctttccacacagacattatggcagcagcggccgaaaacgcttgaaatccgcgttgacggaacgctccaaaaaggagtgacagcgaaggatgtcatcttgtcggtcatcggaaaatacggggtgaaattcggtaccggatatgtcattgaatacaccggggaagtattcagaaacatgtctatggacgaacgcatgactgtctgcaatatgtcaatagaagcgggagcccgtgcgggactgatcgctcctgatgacacgacgattgaatactgtaaaaaccgtaaatacgcgccaaaaagcgaggaatttgaaaaagccgccgcagaatggaaagcgttaaaaaccgatccgggcgccgtatacgatcattccatcgtgttagacggcagcgagatttctccaatggtaacatggggtgtcaatcccggcatggttcttccggtcgatgcccaaatacctgcgccggaaacgattgattctgaagacggtaaaaaagaagccatccgcgcttacgaatacatggggatcgcgccgaatcaaaaaattgaagatattaaagtcgagcatgtgtttatcggctcctgtacaaattcacggatgaccgatcttcgccaggctgcggatatgatcaaaggccgaaaagtcgccgacagcgtcagagccattgtggtgccgggttctcaaagcgtgaaacagcaggccgaggaagaagggctgcaccgcgtgtttctcgaggccggctttgaatggagggaatcaggctgcagcatgtgcctcagtatgaacaatgatgtcgtgcctgaaggggaacgatgcgcttccacttccaaccgcaacttcgaaggcagacagggaaaaggcgcgagaacacaccttgtcagtccggcgatggcggcaatggcggccattcacgggcatttcgtcgatgtaagaaagttttatcaagaaaaaacagttgtgtaaggagtgcgcgaaaagatggaacctttaaaaacgcatacgggaaaagcggccgtcttaaaccggatcaacgtcgatacggaccagattattccgaaacagtttttgaaaagaattgaaagaaccggatacggcagattcgcgttttttgattggagataccttgagaacggtgagcctgatcctgaatttgaattaaaccgcaaagtctatgaaggcgcgtccatattaattgccggagagaatttcggctgcggatcatcccgtgagcacgctccttgggcgctggatgattacggcttcaaaatcatcattgctccgtcatttgccgatatttttcatcagaactgttttaaaaacggtatgcttcccatccgtatgccgtatgatcagtggaaaaaactcgccggtcaatatgaaaatcagtctctaaatatgacggttgatttggaaaaccagctcattcacgacagtgaaggaaaagagatttcatttgaagtcgatccgcactggaaggaaatgctgattaacggttatgatgaaatttcattaacgcttctgctggaggacgacattcagcagtttgaatcgaaaagaagttcatggcttcaagcctgaaaaaagccgcccggcatctgtccggcggctttttttaccgtgtgcatcatcctttcttgtgtttcatgacgcgtgttgatacacttgaacaaaataagcgcctgaaaggaaataaagtatgacgcatgacaagaaaaaagctgatatcattcctttcccccgtctgaaagaacgcttggttgataaagggatggccgccatgaaggataaacagtatgaggaggccctcgaactgttttcagaggcggtaagccacggcgataccgagtccgacgtacatttaggcatggcgatttgttttctggaactcggggaattggaagaagcaaaacaagtttgcgagaaaatgctgaatgaagggtacggccattatttcaccgtattgcaggtgtacatgaccattttaattcagctgaaacaatatgaagaagtcaaaagcacaattgaagctgtgctggaagaaaaccagctgcccgcagaaagtgcggagcaattctaccggctgctcgaattcagccgcaaaatgaccgatcccgatcagcaggaggaggcgtgggaggaggaatacgaggacattcttgatacggaaaaagtgctgaacagccccgctgaacaaatgaatctgattcattctcttaaagaccgcaatattgcaaaatacacgggtctcttaaaaacgattcttcaagatccgggcgcgcatcctcttattaagacaatgattttgacgctgatggccgagcacgactacagtaaaccggtccatattacaaaattcggcgattcaatgaccgcgataccgagtgaaacggtccagcctgatgcggctccgattttgcatcgcgttctccgggtgcttgatgaaacgctgggcaatgaaaaccctacattatatgctgccgtcgaggagctgtggagaagacatctgtacgtcctgcacccttttatgccgaagtttttgaacgcggatttatgggcggcggcgcttcataaggtcggttacgagatgcacggcattgacattgagccggaggaacttcatatgatgtacgagtttgacagccgcgaactcgaagaagcctgcacgatgattaaggatattgaagaaatttcttatttgtaaatcacaccatatagttgaaagcggtaggcgttatgttataatatagtggttgtatttatgtatagcggtttaactgaaatgagaattacggttggacaggctgccagttcattacataatgattctgattcaaagcggttttttctttgacaaagccgcggattgctttagaatggaagaccgacacaacctgaatagatttttggagggaaacacatgtctgtaaaatgggaaaaacaagaaggcaacgaaggcgtattaacggttgaagttgatgcggatacgttcaaaacagctcttgatgatgcatttaaaaaagtagtaaaacaggtttctattcctggattccgcaaagggaaagttccccgcggtttattcgaacagcgtttcggcgttgaagctctttaccaggatgctttagatattttacttcctgtagaataccctaaagcggttgaagaagccggcattgagcctgtagaccgccctgaaatcgatgttgaaaaaatcgaaaaaggcgaaagcttaattttcactgcaaaagtgactgtaaaaccggaagtgaaacttggcgattacaaaggcttaggaatcgaaaaagatgacactgccgttactgacgaagatgtacaaaacgaacttaaagcgcttcaagagcgtcaggctgagcttgtcgtgaaagaagaaggcgctgttgaaaacggcgatacagtcgttcttgacttcgaaggtttcgttgacggcgaagcgtttgaaggcggaaaagctgagaactactcacttgaagtaggatcaggttcattcatcccgggcttcgaagagcagttaacaggccttgaagcaggcgctgaaaaggatgttgaagtaacattccctgaagagtaccacgctgaagagcttgccggaaaaccagctgttttcaaagtgaaaattcatgaaatcaaagcgaaagagcttcctgagcttaacgacgaattcgcaaaagacattgacgaagaagttgaaacgcttgctgaattaaccgagaaaacaaaaaaacgccttgaagaagcaaaagaaaacgaagctgacgctaaattgcgtgaagagcttgttctgaaagcatctgaaaacgctgaagctgatgttcctcaagcgatgatcgacactgagcttgaccgcatgctgaaagaattcgaacagcgtctgcaaatgcaaggcatgaaccttgagctttacactcaattctcaggccaagacgaaaacgcgttaaaagagcaaatgaaagaagatgccgcaaaacgcgtaaaatcaaacctgactcttgaagcgatcgctcaagcagaaaaccttgaagtaacggacgaagaagttgaagcagagctgactaaaatggctgaagcttacaacatgccggttgaaaacatcaagcaggcaatcggttcaactgacgcgatgaaagaagatttaaaagttcgaaaagcaattgattttcttgtagaaaaccgttaatatggttcataataatagacataataaaacagggcgcgattaattcgtgccttgttttgtacaattatgatataactctttttcttggggcaagatagtcattgccgggctgtttttcgtcatacatatagaatgtgcaagtgcgaaacacattgttaccgtcttactggaaagtatggtaaaatgcaatacatactcgatcgtagcaagaaccgttttcttttgcccttcaggtaaaagaaaaagtgagacaagattaaggggtgaaagaatgtttaaattcaacgaggaaaaaggacaattgaaatgctcgttctgcggaaaaacgcaagatcaggttcgtaagctggttgcaggaccgggtgtatatatatgcgacgaatgtattgagctctgtacagaaatcgtagaggaagagcttggtacggaagaagaagtcgaatttaaagacgttccgaagccgcaggaaatccgtgagattctgaatgaatatgtcatcggacaggatcaggcgaagaaatcacttgcggttgcggtatacaaccattacaaacgcatcaattccaacagtaaagtggatgatgttgagctttctaaaagtaatatttctttaatcggaccgactggaagcgggaaaacacttcttgcccagacgcttgcgcgtattctgaacgttccgtttgcgatcgcggacgctacatctctgactgaagccggatatgtcggtgaggacgtagaaaacatcctcctcaagctgattcaggcagcagactatgatgtggaaaaagcagaaaaaggcattatctatatcgatgaaatcgataaagtagcgcgaaaatctgaaaacccgtccattacacgcgatgtatcaggcgaaggcgttcagcaggcgctgctgaaaattcttgaaggaacggttgcaagcgtgccgcctcaaggaggacgcaaacatcctcatcaggaattcatccagatcgatacgacgaacattctgttcatttgcggcggtgcatttgatggcatcgaacaaatcatcaaacgccgtctcggacaaaaagtcatcggcttcggctctgataataaagcggcagacctggaaaaagaagaactgctttctaaagttcttccggaagacctgctccgtttcggtctgattcctgaattcatcggccgtcttcctgtcattgcaagccttgagcagcttgacgaaacggcactggttgaaattctgactaaaccgaaaaacgcactcgtcaaacaatacaagaaaatgttagaacttgatgatgtcgagcttgaatttgaaggcgaggcattatctgaaattgcgaaaaaagcgatcgagcgtaaaacaggcgcacgcggcctgcgttctatcattgaaggcatcatgcttgacgtcatgtttgatctgccgtcccgcgatgatattgaaaaatgtgtcattaccggagcgacagtcgcagacggtgaagcgccgcgtcttgtattaaaagacggtactgttgtcggccaagataaaacatcagcataacacgacaaaacctcctgacccgaattaatcaggaggtttttttcttgtcctgacccttctgaaaatgtttattccgggctttgctgggagatactagcggacagaggaatgaattggatacataaatcgttttttcaggagggaccagcatgagttggacagggatcgcattatttgtacagctgtttttcgggatagtcatcggactatatttttggaatctgctcaaaaaccagcgaacacaaaaagtgacgatagataaagaatcaaaaaaggaaatggaacagctgcgcaaaatgcgcgccatcagtttatcagaacctttatcagaaaaggtgcggccgaaaagctttcaggacattgtcggccaggaagacggaattaaagcgttaaaagcagcgctttgcggaccgaacccgcagcacgtcattatttacggtcctccgggagtcggtaaaacggctgcggcgcggttggtattggaagaagcgaaaaagcataaacagtcaccgtttcaaaagcaggctgtttttgttgaacttgatgcgacgaccgcgcgatttgatgaacgggggattgccgatccgcttatcggttcagtgcatgatccgatttatcagggagcgggtgcgatgggccaagcaggcattccgcagccgaaacagggggctgtgacccatgctcacggcggggtattgtttattgatgaaatcggcgagcttcacccgattcagatgaataaaatgctgaaggtgcttgaagaccgaaaagtatttttagacagtgcgtattacagtgaagaaaatacgcaaataccgaatcacatccatgatatttttcaaaatgggcttccggcggatttccgtttgatcggagcgacaacgagaatgccgactgaaattcctccggccatccgttcgcgctgtcttgaagtatttttccgcgagctggaaaaggatgaacttaaaatcgttgcgaaaaaagcagccgacaaaattcagaaagagatttctgacgaagctctcagcgtgctgaccgcatatacgagaaacggacgtgaagccgtcaatatgatccagatcgctgccggcatggcggtgactgaggacagaaaagaaatcacgactgaagatatagaatgggttgttcattccagtcagctcacacctaaaaatgagcagaaaatcgccgatgaaccgcaagtcggcatcgtgaacggacttgccgtctacgggccgaacagcggcgcattgctggaaatcgaagtgaatgtcacacctgcgcaggacaaaggaagcctgaatatcacgggaattgcagaggaagaaagcatcggcagccaatcgaagtcgatccgccgcaaaagcatggcgaagggatctgtggaaaatgtgctgacggttctccgcacaatgggcatcaaaccttcagactatgacattcacgtcaattttccgggcggaggcccgattgacggaccttcagcaggtatcgcgatggccgcggggattttttccgcgattcaccgcatcccgatcgaccatacggtggcgatgacgggagaaatcagcctgacggggcttgtcaaaccgatcggcggcgtcattccgaaaattaaagccgcaaaacaggccggagcaaaaacggtcattatcccttatgaaaatcagcagtccattctgaaacgaatagacggaatcaccattaaagcggtaaaaacgttccaggaagtgcttgacgtcatattggttgaccctccttcagaacaaaaaccgtttgatatccaaatgaataaagaatccgtataaaccccatttttataatggggtttttttatggaggacatcttttcctttttcagaacagaaagaaagggtatactacgaagagactgttttatatacagggcaggcggataagccgattaaagcccgatcccggaattgtacaacgatgaaaaagttgtattataatggttcatactaaagtcacggaggtgtcagtcacatggcagaagatacaaaacgcagcatcccgctcctccctttaagaggcttattggtatacccgacaatggttttacatttagatgtaggccgtgacaagtcggttcaggctcttgaacaggcaatgatgcatgatcatatgatttttttagccactcagcaggatatttcgatagacgaaccgggtgaagaggatattttcgccgtcggcacttatacaaaaattaaacagatgctgaagctgcccaacggtacgatcagagtgcttgtagaaggaattcagcgggcgcagatccttgaatacaccgaactcgaagattatacttcggtcgatatacagctgatgcatgaggatgattcaaaagacgtggaagacgaagcgcttatgcggacgctgctggaccattttgaccagtacataaaaatttctaaaaaaatttccgcagaaacgtatgcggctgtgactgatattgaagagcccggcagaatggcggatatcgtcgcttctcatctcccgctgaaattaaaggacaagcaggacattctagaaacggcggatattaaagaacgtctgaataaggtcattcgttccattcataatgaaaaagaagtgctggagattgagaaaaaaatcggtcagcgcgtcaaacgttcgatggaacgcactcaaaaggaatattatttgcgcgaacagatgaaagccattcagaaggagcttggcgacaaagaaggaaaaaccggcgaagttcagtcgctcacggaaaagatagaagaagcaggcatgcctgagcgtgtcaaagaaacggcgcttaaggaattaagccgttacgaaaaagtgccgtcaagctcagcggaaagctctgttatccgcaactatattgactggctcatcgcccttccgtggtcggatgaaacagaagataaacttgatattaaaaaagccggggaaatcttagataaagagcatcacggcttagagaaagtgaaagagcggattttggagtatttggccgtgaaacagctgacgaaaacgctgaaagggccgattctttgtctggccggacctccgggagtcggtaaaacatctcttgcaaaatcaatcagtaagagcatggggcgcacttttgtgagaatttcactgggcggagtgcgcgatgagtctgaaatccgcgggcaccggcgcacatacgtcggggcgatgccgggccgtattatacaggggatgaaaaaagccggcaaacaaaatccggtctttctcctcgacgagatcgacaaaatgtcgtctgatttcagaggcgatccgtcttcggcgatgcttgaggtgctggatccggaacaaaacagcacattcagcgaccactatattgaagagacgttcgatttatcgaaagtactgtttatcgcgactgcgaataaccttgcttccatccctggccctctcagagacagaatggagattatcagcctgtcaggctacactgaaaacgaaaagctggagatcgtgaaagatcacctgctgccgaaacaaatcaaagagcacgggctcacaaagagcaacctgcagattcgggatcaggcgattacggacatcatccgctactacacgagggaagccggcgtgagaacgcttgaacgccagattgccgccatttgccgaaaggctgcgaaagccattgtgtctgaggagagaaaacgcattaccgttacagagaaaaatctggccgactatctcggaaaacggatattcagatacggacaggcggaaaccgaagatcaaatcggggttgtcacggggctcgcgtatacgacggtcggcggagatacgctgtcaatcgaagtgtcattgtcaccgggaaaaggaaagctggttctgacagggaagcttggagatgtcatgcgggaatcagcgcaggccgctttcagttatgtccgttcgaaagcggaacagttcggaatcgacccgaaattccatgagaagtatgacattcatatccatgtccctgaaggagcggtgccgaaagacggcccttctgccggaattacgatggccacggcgctcgtttcagcattaacggaccgtgcggtaaaacgcgaagtcggtatgacgggagaaatcacgctgcgggggcgcgtgcttccgatcggcggactgaaagaaaaggcgctcggcgcgcacagagcgggcctgaccactattattgcgcctaaagataacgaaaaagatatagaggatattccagaaagcgtcagagaaggactgaagtttatattcgtttctcacctggatgacgttttggaacatgccttagtaggagagaagaaatgaaagtcacaaagtcagaaatcgtgatcagcgcggtcaaacccgaacagtaccctgatggggggcttccggaaatcgcgctggcgggcagatcaaatgtaggaaagtcatcttttatcaattcattaatcaatcggaaaaacttggccagaacgtcatcaaaaccggggaaaacacagactttaaacttttacatcatcaatgatgaattgcattttgtcgacgttcccgggtacggatttgcgaaagtttccaaaagcgagcgggaagcatgggggagaatgattgaaacctatatgacgacccgcgaagagctgaaagcctgcgtgcagattgtcgacctcagacacgcgccgtctgctgaagacgtgaacatgtatgaattcctgaagtattacggcattcccgtcatcgtcattgcgacaaaagcggataagattccaaaaggaaaatgggacaagcacttaaaggttgtcaaacagacgcttgatatggatcctgaagatgagctgattttattttcctctgaaacgaaaaaaggcaaagatgaagcatggggagccattaaaaaaatgatcagccggtaatgaaaaacccaaaacgcagtgcgttttgggttttatcgtatagttttgttccgcttgataaacaataataaaaggctgattccgatgaaaacatacggccagtatgttttgaagtgttccgtcggaatatggacggactccagccacgccgtaatttgtttaaagaagtataaaaagagggaaaaaccaatcatggcagccgcttcgtatacatattcttttctggcagccgcaaataaggagaatccgaagacgaagagaatcatttcaaaatctcccggccaccatgagagctcaggtttggcgaaaaagtgtaaacctatgccgaaaagaagcatgccgatcaggacgtgaggcccggccgcttcctttttgccctgatacaagagcacagcccccaagagcataaggagcaccggccattccccctgattcgcaaacaggtgaacctgtccgctctgaagccatgcaaataatgaagcggcaagcagaagtcccggtaataaaattgatgtttttttcatcctgtcacctacccgcagtaaaggatttttagtatgatgattacagtgggaacgagctttttatactatagcataacatttttgaaatctgttcacattttcccgaagaaactatgttataattattataaataataaattctatgttagaatgattataaataaattgcgatgtacgggggtgcatgaaagcgatgcatattcttgttgtgggagtagattataaatccgcccctattgaaatacgcgaaaaaataagttttcagccggatgagcttgcagaagcgatgctccgcttaaaagaagaaaaaagcgttctagaaaacattatcgtgtcaacctgcaaccgcaccgaaatatatgcggtggtcgaccagcttcataccggccgttattatataaagacatttttatccgaatggttctcgctgccgaaagaagagctgtctccgtttctgaaattttatgagagcgacgcggcgatcgagcatttattccgtgtggcgtgcggtttagattccatggtcatcggagagacgcaaatactcggccaggtacgctcgagctttaaaacggcgcaggcagaaaagacgatcggcaccattttcaatgagctgtttaaacaggcggtgaccgtcggcaaacgcacgcatgccgaaaccgatatcggctccaatgccgtttccgtcagttacgccgccgttgaactcgcgaaaaaaatcttcggctcattgtcaaataagcacattttgattctcggtgcgggaaaaatgggcgagctcgccgcagaaaacctgcacggtcagggtatcggcaaagtaacggtcatcaacagaacgtttttgaaggcaaaagcgcttgctgaccgtttctccggagaagcgcgcagcttaaaccagcttgaatatgcacttgctgaagctgatattttaatcagttcgacaggcgcgagtgatttcgtcgtgtctaaagaaatgatggagagagcgggcagacagcggaaaggccgtccgttatttatggtggatatcgctgtgccgagagacctcgatccggcgcttaacgatcttgaaggtgtttttctgtacgatattgatgaccttgaaggaatcgttgaagccaacttacaagaacgccgcgaaaccgctgaaaaagtcgagctgtttattgaagcggcaattgttgagtttaagcagtggcttaatacgctcggcgtcgtgccggtcatttcggcgctgcgtgaaaaggcgctgtccatccagtccgatacgatgcagagcattgagcgcaagctgcctcatctgacggtgagagagaaaaaacttctcagcaaacatacgaaaagcatcattaaccaaatgctgcgcgacccgattctgaaagcgaaagagcttgcggctgaagcggattcagatgaaaagctgaagctgtttatgcagattttcgatattgaggaagaggccggccgccagctggacaaaagcctggataaccgccagacggttcattcgtttcaaaaggcagaagcaaaaacgggcttacgtccgcttgtaagtgagtgagggctgtatgattgatacagcaatggcaagacttaatgaagcgacaattgttatttatgcagtaagcgtccttttttactttatagattttcttcaacacaaccggaaggctggaaaaatagccttctggttgctttctattgtctggactctgcaaactgtctatctttcttatttcatgtggcagacgggcagatttccggtcttgaatattacagaggccctttacttttatgcgtgggtgcttgtcacgctttcacttgtggtcacgcagattctgcgggttgattttatcgtgtttttcacgaatgtcatcggtttctcgatgattgcgatccatacgttttcaccgacggatcagcattcggccgccttttccggccagctggtctcagagcttttggtcattcatattacaatggcgattctgtcttacggcgctttttccctttcttttgtcttttcgcttctttatcagtttcaatattctttattaaagaagaaaaaatggggaaaatggctgttgagaattgaagatttgtcaaaacttgattatatggcttacgttttaaatgtcatcggggttccgatgctgctgttgagcctgatattaggcgtgatctgggcgtatgtgtcgctggaaacgctgtactggtttgactcaaaagtgctcggctcgtttattgtgctgcttttatacagctactatttatatatcagaatgattaaggaactgcaggggaaagtggcggcgttatggaattcagcatgttttctcgtgctgatgattaattacttcctgctcggaagcctgtcacaattccattggttcagttaacgcacgcgcccaaacagattcgggaggaaagaaaatgagaacgattaaggtaggttccagacggagcaaactggctatgacccagacaaaatgggtgattaacaaactgaaggaattgaatccttcctatgactttgaaatccgggagattgtcacaaaaggcgaccgcatcctcgatgttacactgtcaaaagtgggcggcaaaggtttgtttgtcaaagagattgaacaggcgctgctgcatcaggagattgatatggcggttcacagcatgaaagacatgcccgccgttttgcctgagggtcttgtcataggctgcataccgaaacgtgaggatccgcgtgatgcgctcatttcaaaagggcatcaaaagctggacggcataaaagaagggggcatcatcggcaccagcagtttaagaagaagcgcccagattcttgctgaacgccctgaccttacaattaagtggatcagaggcaatatcgatacgagacttcaaaagcttgaaacggaagattacgatgctattattttagcggctgcggggctttcgagaatgggctggaaagatgatgtcgtatcggaattcctcgaaccggaccgctgtctgcctgcggtcggccaaggcgctcttgccattgaatgcagagagtcggatgaagagcttttgaagctgtttgcgcaatttaccgatgagtatacgcagcgcacggtggcagccgaacgggctttcttacacgcgatggaaggcggctgccaagtgccgatagccgggtatgcgtccgtcaatgaccgggatgaggttgaattggtcggtcttgtcgcgtctccggacggaaagacgatttataaagaaacagcggcgggacatgatccggaagaaatcgggaaacgctgtgcggcgatgatgtctgaaaaaggagccaaagcactaatcgacagcgtgaaacaggagctcgaacaggatggcaaatgaccttcctttacaaggaaagaccgtgctcgtcacccggaacaaaagacaggcagcaccgtttcgaaaaaaagtggaggcgctcggcggaacggctgtttccgcctctctgatcgcttttcaggaagcgctcccggatgaatgtgcggacagtctgcgggaagacctttctgaaccgggctggcttgtgtttacaagcgtaaacggtgtccggttctttttttcctaccttgatcagcatggccttgcgcttccggaacggaaaaaaatcgcagccgtcggtgaaaagacagcgcgcgccctgaaagagcggggagcccggacggatgcgatgcctgacgagtatgtggcggaatgtctggctgatactttaaaacggcacgcatcagctgccgaacccgtttcattgataaagggcaatttatcacgcgatgtcataaaagcggagcttgagccgcttggctatcaaataagggaatgggtgttatacaataccattcaggatgaaaaaggcatggacgagctgagacgggctgcatcccgctctcattttgattttattacgtttaccagttcatcggcggtgcatacgtttatgcacgcggtcggagacggagaaaaagcgtgggaaaacagcggtgcgagctatatcagcatcggccctttgacagagaaagcgctcttggaatacgggatctcatcccatgtgcctgacacctatacgattgaaggcatgctggacgtcatgtgcagcatgtcgggaaaggatagataatgatgaatcaaacatttaacagacaccgccgtttgcgcgcgaacgctgcgatgagagatctagtaaaagaaacacgtcttcacccttcagattttatttacccgttatttgtcgttgaaggactcgaaggaaaaaaagaagttccttccatgccgggggtttatcatgtatcactcgatttgttaaaggatgaaatggctgagctgatatcgctcggcattaagtcggtcatcgttttcggtgtgccggaagaaaaagacgcctgcggaacccaggcttttcacgatcatggcattgtgcagaaagggattgctgaaattaaaaagcattatcctgaaatgatcgtcatcgctgatacatgtctctgtgaatacacggatcacggccattgcggggtcgtgaaagacggagtaatcctcaatgacgagtcgcttgagctgctggcgcagacagccgtcagccaggctaaagccggcgctgacatcatcgctccttcaaatatgatggacggttttgtcacagtgatcagggaagcgctcgacaaagaaggattcacgaatattccgatcatgtcttatgccgtgaaatattcaagtgaattctacggcccgttccgcgacgcggctgacagcacgccgcagttcggtgaccgaaaaacataccagatggatccggccaaccgcctggaagcgctacgtgaggctgaatcagacgcggcagaaggcgctgactttttaatcgtcaaaccgtctatgtcatacttagatattatgcgtgatgtgaaaaaccgccatcacctgccgctggtcgcatataatgtgagcggggagtattccatggtgaaagcggcagcccaaaacggctggattaaagaaaaagaaatggtgctggaaattttaacgggcatgaaacgtgcaggagccgatctgattatgacgtatcatgcaaaagacgcagcgaaatggcttgctgagtaacgatttcatttgacgggagctgaggcagatgagaagctatgaaaaatcaaaagccgcttttaaagaagcgcagaaactgatgccgggcggagtgaacagcccggtgcgcgcgtttaaatcagttgatatggacccgatctttatgcagcgcggcaaaggatcgaaaatttttgatattgacggcaatgaatatatcgactatgtgctgagctgggggccgctcattttgggccacacgaacgacagggtcgttgaaagcctgaaaaaagtagccgagaacgggacaagtttcggggcatctactgaagtggaaaacgaactggccaaattggtcattgaccgtgtaccgtctgttgaaatcgtgcggatggtcagctccggcacagaggcgacaatgagcgccctgcgtctggcaagaggatacaccggccgcaacaaaattttgaaatttgaaggctgttaccacggccatggtgattcgctgctgatcaaagcgggatccggagtggcgacactcggcctgccggacagcccgggcgtgccggaaggaatagcaatgaatacgattaccgttccatacaacgacttggaaagcgttgcactcgcattccgggagtacggtgaagatattgccggggtcattgttgaaccggtagcaggcaatatgggcgttgttccgccgcaggaaggctttttacaaggacttcgcgacattacggaacagtatggcgcgctgctcatttttgatgaggtcatgaccggttttcgcgtggattataactgcgcgcaagggtatttcggcgtgacgcctgacttaacgtgtctcggcaaagtcatcggcggcggtcttcctgtcggtgcgtatggcggaaaagctgacattatggaacgaatcgcgccgagcggtccgatctaccaggcgggaacattgtctggaaatccgcttgccatgacagcgggacttgagacgttacagcagctcacacctgaatcttaccaagaatttgtgaaaaaaggcgatatgcttgaagaaggcatttcaaaagcagctgcagcacacggcattccgcacacgtttaaccgggcggggtcaatgatcggcttctttttcaccaatgagcctgtcattaactatgaagcagccaaatcttctgatttaaagctgttcgccaagtattataaagggatggccgacgcaggcgtatttctgccgccgtctcaatttgaaggattgtttctctccactgcgcatacaatggaggatattgaaaataccattcaagccgctgagaaagtgttccaggcgatcagccgctgataccgaaaagccgatgcaagcaagacttgtatcggcttttttcaatgcctccattatcatattttcccggattgcggcatacacctttagtgacatctaattgtatggattagatgaaaggaggatatgaacttgccgcataatcaccgattgcaattttctgttgaagaatcaatctgtttccaaaaaggacaggaagtttctgaattactttcgatttcattagaccctgacatcagggtgcaggaagtaaatgattatgtctcaattaaaggatcattagaacttactggcgagtacaacatagatcacagcagtcattttgaagagcttgatagggagctgaggcatgtagaggaagtgagggcgagggaggatggcacggccgagctcattcattgtttcccggtggacatcacgattccgaaaaataaagtgagccacctcaatgatgttttcgtatttattgatgcctttgattatcagctgacggattcaaggatcttaaccattcaagctgatttggcaattgaagggctgcttgaggaatccgagccgaaagagccggagatccctttgtacgtggcgcctgaattttccagagaagaaatgatcaatcttgccggacatcattctgaggacgaaaatgaaccagaattaatgatacgccatgagcctgaaatacctttgactgtatcagaagaagcagcacaagaaacagagaagaacgaggaagaaatcccgcctttactcaggcaggaggaagaagagcaggaaacagccccgattctgagggagcgggaagaagaaaagcaggaaacagccccgattctgagggagcaggaagaagagcaggaaacagccccgattctgagagagcaggaagaagagcaggaagcagccccgcttctgagggagcaggaagaagagcaggaagcagccccgcttctgagagagcaggaagaagagcaggaagcagctccgattctgagggagcgggaagaagaagagcaggaagcaggcccgattctgagggagcgggaagaagaaaagcaggaaacagccccgattctgagggagcaggaagaagcgcaggaagcagctccgattttgagggagcgggaagaagaagagcaggaagcagccccggttttgagggagcaagaagaagaagagcaggaagcagccccgattctgagggagcaagaagaggtgcctaaacctgtttcctttactgagcctcctcctcccgtttccttccagcacgaagaagagccggaagaagctgaggagcctgcaatcatgtcagctgtgaggaatgaacccgtatttgaggatgattcagcagaagtgcaggaagagccgaaagatgatatcgaaccggttttccctgctttcactctgactccgcatgcagaaaaaccaaaaattgcggaacagcccttccttcaaaaagaagagcagccagaggccgagccgcttctccgtcagagcgatcataaggcggcagaagacgaagatgagcctgcggtttttcaagaggagcaggcgcccgtttatcgcgagttcgttccggaacggcaggaagaggagttttacagcgctcctaagctgcttgaagaagaggctcatggtgaagaagggtttgaaattgaggtaaggaagatggcgccgccggaggaggaaaccgggaagcctctcgatttgtcttttcagttttccaaactgccgcctgaggagccggcgcaagctgaacagcctgagccgcttaagcctgaaagaaagaatgaagaagcggcaccgggaaccgagcagaaggaaaatgacaactctcattacttgacaaaattatttacaagggaagaagaaaagttttcaagaatgaaaatttgtatcgtgcagcagcaagatacaatcgaccgggtgtgtgaacgatatgacattacatcccagcagctcatccgaacgaatgctttatcgtttgatgacgagcttgaggaaggtcagcttctgtatatacctgaatataataacagccatgtgtaagcacaaagaggccgtaaaaatgtggtgaatggaatggaagcagtccaatcagtgcttcaggaatacgggctggcggctgagtatattgagcctgtcagcccgcatgtttggaaggtctactcaaactacggcatttttgctttgaaacagctcaagccggcccgcagcagtgaatttacggatcttatgattgagattgaggagaaaggctaccgatcatttgtgccgatctgccgcacgtatgccggcgatttttttgcggggagacagacggagaattcttattatttaatgccttggcttcagtacgatcaggaggaagaacgggatcaaaaacatgtttacctttttaaagaggtcgcgaagctccattctgcgactgtgcgggacatccaaatccggactgaagatatcagcggcttttatgaagcaacgaaaagagattgggaaaatgataagcttgtctatgaacaattcgccgaccgggcggaaaaagagtggtacctttcaccttttgaactgcaggccgttacgtatcttacagaaacggtttccgccgtcaattttgctctggaacgtctggaagaatggtttgacgcggcaaaggatcatgacaagacgagagcggtgatcaaccacggcagtttatcgagccgccactttctgtataatgatgcgggatcgggctttttcacgaatttcgagaaagctgcgctgggccctccgcaaaatgacctgctcggcttttactccagaatgttcagaagctatccgaaagcatgtccggaatgtctggactggttttatacgtatcacaaatcattcccgctccgtgaagcggaaatcagtctgtttctcagctatatggcttatccgtccgccatgtacaaagtgctgaaacggtatcagaccggccaaaggggctctgaaaaagaagagtgcacgcaattattaagagcgttttggcagatgaaaaatgttgagccttttctcatgaaggttcatcagattgagcgggagaaaaaaataaaagcggaaaacgagtcctcttcataacaggactcgtttttttatatccattccaaatgcagggcgcacgctaaaaacagcaggatggcaagcagcaggacatcaaaagtcgtcggaaagaaaatcgtcctgatcccctgaaagatcgtaatcggaataatgacttgcacggatacaaggcggacctgtctggcccactgggggagcgaataagaattgaatttttttctcacgggcaattcctcctcacattcgcctttctatgtatcgtatgtaaggggaagagcggggtgcatgcccatttatgtatgacggcagcggtttttggaaaagatgattgacgaatcaaaaacacttttactataataaagaacataataaataagatcatgagctgatataaatacacctgctttgaacgggaagagtacaagaaagacgcatgaagagagagaagctactgtgctgaaaggcttcttatgccgtctcattggaaggtcgcccgggagcataatttcttgaacatacagtagagaaattcgggccgcacccgttatccgtttaagtgcatgaacaaatctgttcatgaaaaaaggtggtaccgcgaaagagcttttcgtcctttatcaggatgaaggctcttttttagttgctcagccatttctaaacatgctggagggttatcatggatacaaacgaacaaacaatgccgacaaaatatgatccgtctgcgattgaaaaaggccgctatgatttttggctgaaaggaaaatattttgaagcgggcggcgatcaaacgaaacagccgtattctgtcgtcattccgccgccgaacgtgacgggcaggctgcacctcggacatgcgtgggatacgacgctgcaagatatcgttacgcgtatgaaacgcatgcagggctatgacgtgctctggcttccgggcatggaccacgccggcatcgccactcaggcaaaagtcgaagcgaaactccgcgaacagggcacaagccgttatgacctcggccgtgaaaagtttttagaagaaacgtggaagtggaaagaagagtatgctgatttcatccgcagccaatgggccaagatgggactcggactcgattattcacgtgaacgtttcactcttgatgaagggctgaacaaagccgtgcgtgaagtattcgtcaagttgtacgagaaaggcttgatttacagaggcgaatatatcatcaactgggaccctgccacaaaaacggctttatccgatattgaagtgatttacaaagacgtacagggcgcgttttatcatttgcgctacccgttagcagacggttcaggctcaattgaaatcgcgaccacccgtccggaaacgatgcttggcgacacggctgtcgcggttcatcctgaagatgagcgctacaagcacttaatcggcaaaacggtgattctgccgattacaaaccgtgaaattccgattgtcggcgatgattatgttgatatggaattcggatcaggcgccgttaaaatcacgcctgcccatgacccgaatgactttgaactcggaaaccgccacaatttagagcggattctcgtcatgaatgaagacggaacaatgaatgaaaaagcgctgcaatataacggcatggaccggtttgaatgccgtaaaaaactcgtcaaagatcttcaggaatccggcgttctctttaaaatcgaagaccatatgcattctgtcggccacagtgagagaagcggcgccgttgttgagccgtacctgtccacacaatggtttgtcaaaatgcagccgctggccgatgctgcggttgaccttcaggcaaaagaagagaaggttcacttcgttcctgaccgtttcgagaaaacgtacctgcactggatggaaaacatccgtgattggtgtatttcccgtcagctgtggtggggccaccgcatcccggcttggtatcataaagaaacaaaagaagtgtacgtcggccttgaggcgcctgaggacagcgaaaattgggagcaggattcagacgtgcttgatacatggttcagctccgcgctttggccgttttctacaatgggctggcctgatgaaaacgctgaagactttaagcggtattactcaaccgatgtacttgtaacgggatatgacatcattttcttctgggtatcccggatgattttccaaggtcttgagtttaccggcgagcgtccgttcaaagacgtgctgattcacggcttaatccgtgacgagcagggcagaaaaatgagtaaatcccttgggaacggcgtggacccgatggatgtcatcgacaagtacggagcggattccctgcgctacttcctggcaaccggaagttcaccgggacaggatctccgtttcagctatgaaaaagtggaatccacatggaacttcgcaaataaaatttggaacgcctcccgttttgcattaatgaacatggacggcatgacgtatgacgagcttgatctgtccggtgaaaaatcagttgctgataagtggatcctcacaagactgaatgaaacgatagaagacgtgacacagcttgcggatcgttatgaattcggtgaagtcggacgccacctgtacaactttatctgggacgatgtgtgcgactggtatatcgaaatggcgaagcttccgctgtacggggaagatgaagcggcgaagaaaacaacccggtctgttctggcatacgtgcttgaccagacgatgcgtcttcttcacccgtttatgccattcttaacggaagaaatctggcagcaccttcctcatgaaggcgagtcaatcacgatcagctcttggccggttccggtgccggaacatacggataaagaggcagcggcggatatgaaactgctcgttgaattaatccgttctgtccgcaatatccggagcgaagtcaacacgccgatgagcaagcaggttgaactttacattaaaacatctaccgaagacattgccggccgccttgagaagaaccgttcttacgttgaacgctttacgaatccgagcacgctgaaaatcgggacggatatcgctgcggcagacaaagcgatgacagctgtcgtcaccggagcggaagtcattctgccgcttgaagggctgattaacattgatgaggagatcgcccgtctgcaaaaagaattcgacaagctgacaaaagaagtcgaacgcgttcagaaaaaactcggcaacgaaggattcattaaaaaagctcctgagcatgtcattgaagaagaacgcggaaaagagaaagactacacggcaaaacgcgaagctgtccggcagcggattgcagagctgaaaggctgataaaacagcggggcggtttcctaagaaaccgccttgtcgtataaaagaggggatttcattgtttaatacgtacaaagaagcgatcagctggattcacggcagactcaagttcggcgttaagccgggccttctccgtatggaaaagctgatggaaaaactggaacacccggaaaagaacattcgcgccattcatgtggcgggcacaaacggcaaaggatcaaccgtttcttttatccgttccgtccttcaagaagccggttatacggtcggcacgttcacatcgccttacatgattacgtttaatgagcgaatcagcgtcaacggcacgccgattaccgatgaggaatggagaacgctcgttaatgacataaaaccgatagtcgatgagcttgataagaccgatgccggaacggtgacggaatttgaaatcattacagcgtgtgcatttttatattttgcgaagcgggctgatatcgattttgtcatttttgaagcggggctcggcggcacatttgattcaaccaatattgtgaaaccgcttctgtcggtcattacaagtatcggacatgaccatatggccattttaggcaataccatcgaggagatcgccgggcagaaagccggtattattaaaaattccattccggtcattacgggcgtcaatcagccggaagcactcggcgttattgaagcggaagccgaaaaaaagcaggctccgtatcagtcactatataaaacgtgcagactgtttaatgaagcggcgcttccgtccggcgaaagcttttcgctggaaacagaaacgaaatgctatgaaaacattcaaacgtcgctgatcggcattcaccaaaggcagaatgcggcattggcgatattggccgctgaatggctgaatcgcctggaggccgcagtcatttcagaagaagcgatgcgaaacggactgggaaaatcttcctggccgggccggtttgaacgtcttcaaagccgccctttagtgtttgcggacggcgcccataacgaagagggtgttgaaacgctgacagaaacgatccggcagcgctttgccggtaaaaacgtccatgtcgtattcagcgcattaaaagacaaaccgtatcaggaaatgattaaaaagcttgaaaccgaagcggattccattcactttgtatcatttgactttccgcgtgcttcaagcgccgaagccctttacaatgcaagcagtcttgcatctaagagcttcgatgagaacccggacagtgtgaaagaatggatagaacaaaaagacggggcggatgatgtcatcatcattaccggctccttatattttatttcagagatgagaaagcggcttatctgacagcctctcggatgcccggcagaccattttccggttttgccgggtgtttttatgctgaaaatatattttcagccatttcagtcatggtgtttttctttgctataatctgagccagattgatagtaaaggtgtggtctgagtgcttttaattctgttttttctcggcttgattttcggttcttttttttatacagcagcgtgccgtatcccgctgcgaatctcggttatttcgccgcgttcatcctgttcgttttgccgcttgccgctctcctggggggagcttgtgcccgtcgtctcctatattctgcaaagaggcagatgcagaaactgccgtgcgaagctgtcggttatgtatccggcggcggaatgctggacggcgtgtttattcacggctgcaggcattcatttcggtttctcaaaagaactgttagtcgcgctgttatttctgtctctcctcatgattgttactatgacggatctgcaatatatgctgattcctgacaaagttctgctgttttttcttccgcttttcatcgccggccgaatgttttctccgctggattcatggtatgcagggtttgccggagccgtttgcggattttttctgcttgtttttatcatgtttgtcagtaaaggaggcatcggcgcaggtgatgtgaaactgtttggggtgatcggcctgacgctcggcgtgaagctcgtgctcattgcattctttctttccgttatgatcggagcggtatacggtatgtgcgctgcagcccggggcagtcttggtaaaaagcagccatttccgtttgcgccggccatctcagccgggagcgctttgagttatttatacggtgatgagctgttttcgttttacatcaagctcgcttcaggcggggcttgaaaaatttggcgaacgttttttggacaagacgacaaaagtcttgttcttttttttttcgcctatgctaaagtgtgaaccatgatcagttcaaggtacggccaagacgaatgcaagggggaagagacgttgaaaaaaaggaagagcaaaaagcacagcaaagctaaaaacaatgcccttaaagtaaccattaacggacaagaagaaacgatgtatggacaagaagatgtgaatgaaggcggggagaagaccgtcacattttccaattgggaagaaacaaaaaaggcggaacaggagaccgccgcttcccatgaagatccgaaagaagaagatttcaattgggatcatgagaagaattctgaggtatttgaagatgacccgaaagtcgttccgccataccagaagaaaaaaacaggccctcattttccgaaaaaaaagcagccgtcttctccagttaaaaaagcggtcacgacaattgccgttgcggctgttttaggcaccgggctcggccttgtcgccttaaatatgtcgggaagtaaagaagcctccgctccggcatcagctgacaaaggttcacaagggcagacggtgaaagcgggagatgtttctaacgacaaatctgaaacagccggcacaggagatgcggaatcttcagcgggaaactataaaacatatgcggtgcaggccggaaaattttcatcagaaaaaggagcgcaaacgcttgttgaccagctgactgaaaaaggatactcggccgtctctctggcaaaagaagacggatacacatacgtgatcgccgggcttgcagcggaaaaaagcttatcacagcaattgggtcagacactgatagaccatgattttgaggcttggggcggaaaagagctcagctttgcggtcgattcagggctggaagactcttttaaacaggcatctgagctctccgccaaagcgattaccggcaaaaatctttcaaaaacggaagtggctgaagcggcaaaagcggcagacggcgcagacgccgctgacaaaaagcagaaagaggccgtgcttcaagcgctgaaagaactggaaacgtcgggttcggaatccggctggaaagcccaaaaagagctattaagtgttgtaaaatagtatctcatttcccgtcatccggcgggattttttattttgtcatcaaaaagttatttttctgaaattgtggttgcccgtttgatttggtaggatagacaagtatctttttttcttaagcaaaccctgaaaggatgacaaccatgacaaaacgcttaatactcgcatcacaatctccgcgaagaaaagaactccttaatcttcttcagattccttacagcattattgcgagccgcacagaagaaaaattaaatcgaaacctttcgccggaagaaaacgtccaatgtttggccgagcaaaaagctagtgctgtattggccgaaaatcccgatgcagtcgttatcggggctgacacgatggtgtgcatagacggcgagtgcctcggcaaaccgcgtgacagggaagaagcggcacagatgctgcggaggctttccggccgaagccatcaagtcattacggcggtcagcattcagacgcgtgaccggaaagaaacattctgtgacacaacggaagtgacgttttggccgctcagtgaagacgacatacagctctacattgaaacaaaagaaccgatggataaagcaggtgcatacggcatccaaggaaaaggcgcgcttttagtgaaaaaaatagacggtgatttttattctgtcgtcgggcttcctgtcgctaaaacaatgagagccttgaaagaatttaatataaaagcttgatgttcaaaccgggaaggggaacaaggaggggttgatcatccgtgatctgccgttaaaattaagagatttccccgaaaaagaaaaaccgagagagcggcttctgcacttcggagccgaacatctctctaacaatgaattgctcgccatcctgctgcggacgggaacgaaacatgagtccgtcatgaacctcgctcaccggctgctgcggacgtttgacgggctgcgcctgttaaaaggcgcctctgcccaggagctttccagcattccgggaatcggaacggtgaaggccgttcagattcttgccgcaattgagctggggagccgcattcataagacatccgccggggagcattgcgtcatccgctctccggaagacggggcgaagtatgtgatggaggatatgcgctttttaacccaggagcattttgtctgtttatatttaaataccaaaaatcaagtcattcataaacgcaccgtttttatcggaagtctgaattcatctattgtccacccgcgggaggtgtttaaagaagctttcaaacgatccgccgcgtccttcatttgcgttcataatcatccttcaggagatcctacaccgagcagggaagatatagaggtaaccaggcggctttttgagtgcggaaatttaatcggcatcgagctgctggatcatttggtcattggtgataaaaaatttgtgagtttaaaggaaaaaggatatttgtaacactttttttttcgttgatttaagatataatagattttatgagtttttccctttagggtatttttgctttaagaaaggaagatacatacatatgttcggaattggtacaagagaccttggtatagatttgggaaccgcgaatacgcttgtgtttgttaaaggtaaaggaatcgtagtgagagagccgtctgtcgttgctctgcaaacggatacgaagtcaatcgttgcggtcggtaacgatgcgaaaaacatgatcggaagaactccgggcaacgtggttgcgctccgtccgatgaaagacggcgttatcgctgactatgaaacaactgcgacaatgatgaaatactacattaatcaggctgtgaaaaataaaggattgtttgcgagaaagccgtacgttatggtgtgtgtgccgtcaggtattacggccgttgaagaacgggcggtcatcgacgcgacaagacaagcgggcgcacgtgacgcttatccgattgaagaaccgtttgcggcagcaatcggtgcgaatcttccggtatgggagccgacgggcagcatggtcgttgatatcggcggcggaacaactgaagtggcgatcatttctttaggcggcattgtcacgtctcagtcaatccgcgtagccggtgacgaaatggacgactcaatcatcagctatatcagaaaaacatataatctgatgatcggtgaccgtacggcggaagccattaaaatggaaatcggttcagcagaaaccggtgaagaaaatgcgtcaatggaaatccgaggccgcgatcttctgacaggtctgccgaaaacgatcgaaatcacgggaacggaaattgcaaatgcactgcgtgatacagttctctcaatcgttgatgcggtgaagagcacgcttgaaaaaacaccgcctgagctggccgctgacattatggacagaggtattgtattaacagggggaggcgccctgctccgcaatctcgacaaagtcatcagcgacgaaacgaaaatgcctgttcttatcgctgaagatccgctggattgtgttgcgatcggcactggaaaagcactggagcacatccatcttttcaaaggaaaaacaagataatcaggagttaaatagaagaggtgtatcacgatgccgaacaaacggttaatgctattacttctgtgtattatcatattggtggctatgattggattctcgctgaagaacggccgtaataccacctggcctgaaaagctgatcggtgatacgacgggagtatttcaaaacatttttcacacgcctgccgaatattttgcagggttcttcggggacataaaagacctgaaaaacacgtacaaagaaaacgaacgcttaagacaaaagctggacggacagacacaatatgaagcgaagctccaagaactcaaagatgaaaacaagaagctgcgtgatgaactcgggcatgtcaaatcaatttccgactatgatccgattttagcgaccgttatcgccagaaaccctgatcaatggtacaagcagatcatgatcaataagggaacgaagcacaaagtggccaaagacatggctgtcacgaacgaaaagggtgcgctggtcgggaagatcaaaagcagcggactcaacagtttcacatccgccgttcagctgctgagcgatgttgaccgcaataacagagtggccaccaaaatctccggcaaaaagggaagcaaaggctacggtttaattgaagggtatgataaaaagaaacagaccctgaaaatgaccatccttgaaccggatgaaaaacgtgaagtgaaaaaaggcgacctcgtggagacctccggaacgggcggcgtatttcctcaagggctgacggtcggcgaagtgaccgatgtagaatcagatgcttacggcctgacgaaaatcgcttatgtgaaaccggctgccgacttgtacgatcttgaccatgtcatcgtcgtgaaccgaagcgtagcaacaggggaggaaggatcgtgaaacgtttccttctccctttgattatgattttggtcttttgtgcggaaagcatctataccgatctggtgcgttttcctttcgtttccgtcgagcagcaggtcgttccgcattttcttttgcttgcgctgatttttatgtcggcttatatcaaccaaaagcatgcggtgatctacggtttcattttcggatttctttatgacatcaattatacgggtgttttaggcgtttatatgtttggttttgccggattatgctatctggcggccaaagcgtttaaagtgctgcagacaaacgccctgatggtcattctggtcgcggtgctgagcgtatgtgtgcttgaattttacgtctacggcattcagacgttaatccgcagcggcactatgacgtttaacgattttgtcattcagcgattcttgccgaccgctttgctgaatatcgcgggagccgttatattagtcctgcccttcaggctgttttatataagtctgaagaaagaattaagagatgagtaaaaaggattttatctttttttgacgaaaagagtatgttgttgaggtgaacattgatgaagaccaaaaagcagcaatatgtaacaataaaaggaacaaaaaacggcttaacattgcatctggatgatgcgtgttcttttgatgagctcctcgatggtcttcaaaacatgctgtcgattgaacaatatactgatggcaaaggccaaaaaatcagtgttcatattaaactcgggcatcggtatctgtatcaggaacaggcagagcagctgactgatctgatcgcgtcaaagaaagatttagtcgtgcattcaattgacagtgaagtcatcgccaaagaagaagcgcagcggatgaaagaggagcaggaaattgtttcggtttccaaaatcgtccgttcgggccaggtgcttcacgtgacgggagatttgcttttaatcggagatgtgaatcccggcggtacgatcagagccggaggaaatatatttgttctcggttcattaaaagggattgcccacgcgggttataacggaaataaccgggctgtgatcgccgcatccgaaatgatgccgacacaattgaggatcaatcacgtgttaaatcgctccccagaccacattcaaaaagggaacgacatggaatgtgcttatttagatactgacggaaatatggtcattgaacgccttcagcaattggctcatttaagacctgatctaacaaggcttgagggaggaatgtgaaattgggtgaggctatcgtaataacttcgggaaaaggcggagtaggtaaaacaacaacatctgcaaacctcggtaccgccttagccattttagggaagcgcgtctgtttggtagacacagatatcggactgcgcaaccttgatgtcgtaatgggtcttgaaaacagaattatttacgacttagtagatgtaattgaaggccgatgcaagacgcatcaggcgcttgtcaaagacaaacgttttgatgatctgcttcatttaatgccggctgcccagacaagcgacaagacggctgttgtccctgagcagatcaaatcgcttgtgcaggagcttaagcaggaatttgattatgtcattattgattgtccggcgggaattgaacaaggctataaaaatgccgtctccggagctgataaggcgattgttgtgacgacgccggaaatatcagcggtgcgggacgctgaccgcattatcggacttttggagcaggaagatatcgaaccgccgcgccttatcgtgaaccgtatcagaaatcacctggtgaaaaacggtgacacgatggatgtggatgaggttgttcatcatctgtctattgatctcctcggaatcgttgctgacgatgatgaagtgatcagggcttcaaatatcggcgaaccgattgccatgaattccaaaaaccgcgccagcattgcgtaccgcaatatcgcccggcgcattttaggagaatccgttcctttgcaggtgcttgaagagcagcaaaaagggatgatggcgaaaatcaagtcatttttcggcgtgcgttcataatatataccagaatacaaagatctgatgaagcccagcttatcaggtcttttttgttttttaagagcgcatatttgcaatggacaagacataggatgtacaaacccaacgattgcaaaggatgatggcgatgagtcacagagctgatgaaattagaaaaagactggccaaaagaagaaaacagcggcctgaatcaaaacggactttcgttcaaaacgctcaaacgcagaattttcccgcgtggcagacggtcaaggagcaggaaaagcacaagcttcttccggactacgaatatcaaacggaacacccgcccgaatttaacgggcggcatccattgatcagcgctcattctattattttaaaatgcctgctggccgcctgtctcgtactgatctccgctattgcctataaaactgacaaacagccgctgagtcagatcaaaccggcaatcgcacaaacctttcaaaaagaatttcagtttgctgccgtaagcaattggttcgtatcttccttcggaaacccgctcgcttttcttacgccgggaacgaaaaagaaggacggtcaggtggcggtcagtcaggatatggccgttcctgccgcggggaaaatccagcaggactttcaaaataacggagagggcgtcgtcgtcgaaaccgccagtgaagccattgacagcgtaaaagaaggctacattatggaagtgagcaaagataaaaaaacagggctgacggtgaaggtgcagcacgccgacaatacaagcagcatttacggccggctgaaagatgttaacgtttcattgtacgattttgtcgataaagggaaaaagatcggttcgatcaagctcaacgataaaagtaaaggccagtactatttcgcgatccaggatggcgataaattcatagatccgatccaggtgatcacatttgatgaataaatggctcatcctcctttttaaaattcatgtccatccttttctttggattatcatggggctcggtcttatgacggggcacatcaaagcgctgctgtgtcttttgctggtcgtatccgttcatgagctggggcatgctgctctggctgtgtttttttcgtggcgcattaaacgcatctttctgctccctttcggcgggacggttgaggtggaggagcacggaaaccggccgcttaaagaggaattcgcggtcattttggcgggcccgcttcagcatgtgtggcttcaggcggcagcctggctctttttcacgtcaggttttgcaagtgagcagacatttgagatgtttaccttttataacctctccattcttttcatcaatcttttgccgatctggccgcttgacggcggcaagttcgtgtttttatacttctctaaacaaatggcttttcaaaaagcgcatctcctcagcctgcagacatcggccgtttccgcgcttttgctctgctgctggattgtgctggccgtcccccttcaggtcagcgcatgggtgctgttcgtctttctcgccgcttctttatgggatgaataccggaagcggcattatattcagctgaggtttcttttggagagatactacggcaaaaaccgcgatgtcgccatgctgcatcctttgacggtcgcggccgatgccaaagtaaagcatgtcatggctgaattcaaacggggatgcaagcaccccattatcattgaaaaagccggcgaaaagctcagccagctcgatgaaaatgaagtgcttcatgcgtattttgccgataaacggacagattcctctatggaagacctgctgctgccttactagaaatagattgacatatccttttggttctgatatattttttaatgttatggatgtagcaccaatgctacaaccgctcgggacaggtgataagagctttaaagccccctgttgctggcgagtcttagtctaataggaggtgcagagaatgtacgcaatcattaaaacaggcggaaaacaaatcaaagttgaagaaggtcaaactgtttacatcgaaaaacttgctgctgaagcaggtgaaacagtgacgtttgaagacgtattgtttgttggcggagacagcgtgaaagtcggcaacccaacagttgcaggcgcgacagttacagctaaagttgaaaaacaaggccgtgcgaaaaaaatcactgttttccgttacaagccaaagaaaaatgttcataaaaaacaaggtcatcgtcagccttatactaaattgacaatcgaaaaaatcaacgcgtaagcatgattgaggcaacaattcgaagatcccggaatgacgggggcattttgtcctttgaaatgacgggacatgccgattttgctgaacatggacgagatctcgtttgcgccggggtcacggctgtcgttttcggagcggtcaatgcggttatcgcgctggctcctctcgaaccgattcttgatataggcgaggacgggggttatttctattttgaattccctgaagccgctgatcaggaagctttgcaaaaagcgcagctgctgattgaaggcatgattgtttctcttgaaacgatcgagcgggattacagtgaacacttacggttgactgcaaaccaaatataggaggtgagttacatgcttagattagatcttcagtttttcgcttctaaaaaaggtgtaggttctacaaagaacggacgtgactctgaatctaaacgtttaggcgctaaacgtgcagacggtcaattcgtaacaggcggatctatcctttaccgtcaacgcggaacgaaaatctacccaggtgaaaacgtgggccgcggaggagatgacactctttttgctaaaatcgacggaactgttaaattcgaacgtttcggccgtgaccgcaaaaaagtgagcgtatatcctgtagctcaataatgacacaaaaaactccggtcgttgactggagttttttttgcagtaagcggagtaacatcaagaatgaaaagcagaggatgcgtgagtgaaccccgccttgaatgaggacatcagcttctcatacccactggatatgttccccaagcagtgataccaaaaatgtttctgcctggcatccgcattgtatgcgatccgaaaaaggaacatgatgaaccaggaaaaacaagtgtttttttaacaaagccttctctgttataattcatagtacacacttatcaagactcctaaaaagaaattaaacgattgggagtgcgaaaatgaaggatgtatcgaagaaacaagaagaacctgtaagcgatgcggctctgatcaatgaactgatccaattaatgggccatttccgtcatgattggatgaataagctgcagctgataaaaggaaacttaagtttgcagaagtatgacagggtcgttgaaataatcgacgaaatggtcatagatgcaaagcacgagtcaaagctctcaaacctgaaaaccccgcacttggcgtttgactttctgacatttaattggaagtcccgttatatgaggctcgaatacgaagtgctcggagaaattaaagatttatcggcatatgatcaaaagctgtcgaacctgatgagaaaactgtttcatctgttcggtctggcggtaagcaatgaaagtgaaaatcatctgaccgtatcgctgcagacggatcaccctgacagacagcttattgtatatctcgattttcatggaacgattgcaaatgcagatgtgtttgatgaatttcgcaaatcccggtatgaggactttgatgtcatgcaatttgagctgaccggccatgaatgtgtggccgaaattggaatgaactagcggttttttacggtttagaacggaggatattatgtttgtagatcaggtgaaagtatatgtaaaaggcggcgacggcggtaacggaatggttgcgttccgccgtgaaaaatatgtgccgaaaggcgggcctgccggcggtgacggaggtaatggaggcgacgtcgtttttgaggttgatgaaggactgcgcacgctcatggacttccggtaccagcgccatttcaaagcgatacgcggcgagcacggcatgtctaaaaaccagcacggcagaaatgcggacgatatggttgttaaagttccgcccggcacagtcgtaacggatgacgatacaaaacaggtcattgccgatctgacagagcacgggcagcgcgccgtcatcgcaaaaggcggacgcggcggacgcggaaatacccgctttgcgaccccggccaacccggcgccgcagctgtcagaacacggagagcccggaaaagagcgctatatcgtgcttgaactgaaagtgcttgcagacgtaggtctcgtcggcttcccgagcgtcggaaaatctacgcttctgtctgtcgtttcatcagcaaagccgaaaatcgccgattatcattttacgacgcttgttccgaatctgggcatggtggaaacggatgacggaagaagcttcgtcatggcggatctgcccggtttgattgaaggagcgcacgaaggagtcggcttaggccaccaatttctccgccatatcgaacggacgcgcgtcatcgttcacgtcattgacatgtcagcgatggaaggccgtgatccgtatgaggattatgtgaccattaatcaggagctcagtgaatataatctgcggctgacggagcgtccgcaaattatcgttgcgaataaaatggacatgcccgaagcggctgaaaatctaaaagcgtttaaagaaaagcttcaggatgaccatcctgtcttcccgatcagcgcggtgacgagagaaggactccgcgatcttctgtttgaagtcgccaaccagctggaaacaacgcctgaattcccgctgtatgatgaagaagaactggcggaaaaccgtgtaatgtacacgatggaagatgaagaaattccatttgacattacccgtgatccggacggcgcgtttgtgctttcaggtgacagtctggaacgtctctttaaaatgactgacttctcccgtgacgaatccgtcaagcgttttgcaagacagatgcgcggtatgggcgttgatgaagcgctcagagaacgcggtgctaaagacggcgatatcatccggctgctggaatttgaatttgaatttattgattaaaaagacggagagcttgcaatgcaggctctctgatgtaaaagggaggggtgcaggtgaaagaagagacattttatttagtgcgtgaagacgttctgcctgatgcgatgcggaaaacccttgaagtcaaaaagctgctcgacagaaaaaaggctgaatcggttgcagatgccgtgcagaaagttgatttaagcagaagcgctttttacaaataccgagatgcggttttccctttttacacgatggttaaagaacaaataatcacacttttctttcatttggaggatcggtcaggcgcgttatcccagcttttgcaggcggtggctgactcaggaagcaacgtgctttccattcaccagacgattccgcttcagggcagggcgaatgtcacgctctcaatcagtacgtccgcaatggaagaaaacattcatacgttaatgaataaactgagaaaatttgattttatagaaaaagttgagatcttagggtcaggcgcgtaaggagagaagagacatgaaagtcggttatttagggccagaagccacatttacacatctagcagtcagttcctgctttcaaaacagcgtgacacaagcaccttatcaaacaataccggcatgcatggatgcggcggttgcgggagaagttgatcttgcatttgttcctttggaaaacgcgctggagggctcggttaacttaacgattgactacttgattcatgagcagcctcttgcgatcgtgggggaaatgacgctgccgattcaccagcatctgctcgttcacccttcgagagaaaatgagtggaaaaagcttgagaaaatttattctcattcccatgcgattgcgcaatgtcacaaatttcttcaccggcatttttcgtccgttccttatgagtatgcgaagtcaacaggtgcggctgccaagtatgtcagtgagcattcggaccttccgatcggcgtgattgcaaatgaaatggcggccgctacatacggattgagcatcgtgaagcgggatattcaggattatcaggacaaccacacgagatttgtcattctttcgcctgaaaaagacgtctcattcgaagtgaatgcgaaactgtcttcacggccgaaaacgacgatgatggtaacgcttccccaagatgaccaatcaggcgcgctgcacagggtgctgtccgctttttcatggagaaacctgaatttatcaaagatcgaatcgcgcccgaccaaaacgggtctcggcaactatttctttattattgatattgaacaggcgatggatcaggttctcattcccggtgccgttcaagagatggaagccctcggctgccgggtcaagcttctgggaacatatcaatcctattcgatataaaaaaagctccccttcagggggctttttttttaatcttttattaaaatacccgcgtcgtccagcgcttgacaggcttggtcaatccgctcttttgtcggggcgcttaacgtatggagatgcacgcctccggtcagctgtgaaaggtaagcggcatttgtcgagttaatgtgatccatgaattgtttgacttctttccgtgtgctgactcttatggcggcggttaaatcgccgtatacggggtgttcaataatgacgtcctttatggtgacgccttcatcgacaatgagttcaagctcttcttccgtccgctccgggccgtgcagacaggcgacaatccgttcggcgtttttttcgccgccggcattcatgctgatgtataaatagccttggctcgtcgcgataatcggttcgctttttgctttcaagagcgatatgtcctgcacgatcacctgtcttgaaacatttgcttttttggccaattcgcctcctgttaatggcgagccggcttctttcagccaatgaagcagcatgtcgcgtcttttcgccccagtaagcttcgttccttctgtcaaattgctgattctcctttcttttgctcccatagcgccgtaaatgtatgtatcagcatatcgagctgttcacatgttgtttcgtttccgaatgagatccggaaaaactgccgcgcttcccgttcggtttttctcagcgccttcatagctgaagaagggccgtggctgccggcggaacatgcgctcccggttgagatgcaaatatcgttacgattacattctaacataatatattgtccttcaaaggagtgaaaaaaacacccgacaatgtggggcaggcattcaccgccggtttcttcctctgaaaatgaaatggggaggccttgacgcctaatttggtcatacaaataattcctcagcctgtcagcatgctcacggtgttcctccatatgtttcactgcatactccgcagcagcggtaaaagcgccgatggccggcacattcaccgtaccgggcctgaacccgttttcatgcacggtatgcggataaaccggattccagctgacacccggccgaatgtaaacagccccggtgcctttcgggccgtatactttatgaccggagacggaaagggcgtcgattcccgcctgatccgcatcaatcggcagtttgccgaaactttgaacacaatcgcaatgcagtaaaatgtttctctggtgaagaaaagcggccagacgattcacaggctggatgaggccggtttctgaattggcgtgctgtatggaaacgagccccgtgtcaggacggatatgagccgccagtatgtcctcggttataaggccgttttcgtcgggatatatgatggtgacatcaattccccggtcagctaaaaacgccgcggcattatggatcgagtggtgttccattgcggtcgtaataaaatgttttttatgatcgggcagaccgtacagcaatgattggacggccaagatgttcgcttccgttccgccgcttgtaaagtgaatgccgtctgccgctccgccgatcaattttcctgcagaatgtctgcaatattccagcacgtccgccgctcttcctccggcgtcatgaaggctgctagcattgccgtatacctctgtgctgagatgctgaaagactttcgcggcttctttgcttaaaggcgttcccgccgcgtaatcaagataaatcatacagcccgtctcctatccgtttatgttaaaaaaagcttgagtttattttatcgttgtgtaaatataggtgtcaagacaggtgtaaatataatgggagggtgatgtatgtctgaaaaaacaattatcgtcattggtacggggacggcggcccttgcctgtgcttcctcatttcctccgtcataccaagtaaccgtcatcacaaagagaaacgtaacgaacagcaattcgtattatgctcaaggcgggattgctgtttcatacgcaaaagatgactcgatagaatcccatgtgaacgatacactgtatgcgggatgcggacacaatgacgtgacagccgtgcggcatttgctgcaaagcggacagagcatgataaacaggctgatagaaggccttttcccttttgatacgaagtcggacggaacgttttgtctcggcagggaaggcgctcattccaaaaggaggattctgcacgccgggggagatgcgaccggacggatgctggttgagtttctggttcggcagctgagggacggcattcggatcattgaacacgagacggttgttgatctgctgattgaacacgggcgatgcgcaggcgttgccgtaaaggatgcttcaggtgccgtttcttacagaagagcggattgtgtagtgcttgcttcaggcggctgcggcagtctgtaccaatatcacacaaatgattccgccataacgggagacggcatcgctcttgccttccgcgcgggagctgagatcacggatatggagttcacccagttccacccgaccctccttgtgaaaaacgggactgtttacggtctgatttctgaagcagtgagaggagaaggcggatatttagcagatcgcttcgggcgcaggatcatggctggcagacacgcgcttgaggatttggcgccccgggatgtggtttcacgggcgatttatgaagaaatgatgaaagaaaatcctgtttttataaattgcagccgaatagccgattttaacaaacgttttccgaccataacagaaatttgtcaaacagccggcgttgatcttgaaagcgggatccccatagcacccggaatgcattttttaatgggcggagtaaaagccgatacatgggggaaaacgtccgtgcctgatttgtacgccataggcgagaccgcctgcacaggcttgcacggggcgaaccgccttgcgagcaactcactgctggaagcgctggcaagcgggcaacgatgtgctgaacatatcattcaaacaccgttaaacggaagatataaaaaaaccccgaagaaaactgatgtcatcttacaagtgccggacacaacgattcatgtgcttcaagccaaaatgacaaccggagcgggtatcgtcagggaaaaagaaaacctgcaggcgctgacatcctggcttaacaacgtatctgtgcatcatataaatgtgaaggatatcacaatggaacaagcagagctatcctgcctatggaagactgcgcaacttgttgtcacctcagcccttattcgggaagaaagcagaggcgctcattttcgtactgattttcccgggacggagaaagattggcacggaaaacaaatcattcattcaacatctggaacggttatcagaaaaaacgaaaggattggggaactatggacattctgcagctgaaacaaatgctgactcatttttttcaggaagatatcggaacgggtgatgcgacgtcacaagcgattttttctgatcagcaatgtaaagcgcggatcatcgcaaaaacagacggcgtgtttgccggagaagacgttatccgtgaaggatggaagcttttacacgatgatatccgcatccgccctctgaaaaaagacggagaacggatgaaaaaaggagatgtgctcgctgaaatggaaggccgggcggcagctcttcttactggggagcgggtcattctgaatctcatacaaagaatgtcaggcattgcgacaatgacggacgaggctaaaaggcgtcttgatgatccgtccattaagctttgtgatacgagaaaaacgacaccggggctcagaatgctggaaaaatacgccgttcgggtcggaggcggctttaatcatcgcttcggcttatatgacggcatcatgattaaagataatcatattgccgcctgcggatcgataaaggcggccgtggagcgggcaagagaaacggcagggcagatgcttgcggtggaagtcgagatcgaatccgaacagcagctgctcgaggcaatagaagcgggcgcagacattattatgtttgacaactgtccgcctgagtccgtccggcgttttgcaggcatgacaccgggccatatcaaaacggaagcatccggaggcataacgctcgacacattgcccgcttataaagggacgggcgtccaatatatttcactcggatttctgactcattcagtaaaaagcgccgacatcagcatggatgttgaggctgcggaacagggggatttttaagatgtctatttttgacgtgttaactgcatcagccgaaatgatgccgagccattataaagacatgagcaccggagaaatggaaaagcgtgtcgccgccattaaacgggatttcggaaagcgcctgttcattccggggcatcactatcaaaaagacgaagtgatacaattcgccgatacggcaggtgactccctgcagcttgctcaagtggcagaaaaaaataaagaggcggaatatattgtgttttgcggcgtgcattttatggcggaaaccgctgatatgctgactgatgataaccaaaccgtcatattgcccgacatgcgcgccggatgctcgatggctgatatggcagatattcagcagacggacaaagcatggcaagagcttcaagaactgtacggtaacaccatcattccgttaacatatgttaactcgacggcggaaattaaagcattcgtcggtcggcacggtggagcgaccgtcacctcttcgaatgcccggagtgtgctgaaatgggcttttaaacaaaaagaaagaattttatttttgccggatcagcatttaggcagaaatacagcctatgacctcggcattccgctgacagaaatggctgtatgggacccggggcagaaccgattgcttactgaccatccggaaaacattaaagtcatcctttggaaaggacattgctccgtacacgaaaagtttacagcggaaaatatttttcagctgcggcagcgggattccggcatccgcattatcgttcatccggaatgttcgcgggaagtggtctcgctcagtgacgacagcgggtctaccaaatatattattgatacgattgaacaggcagaaccgggaagcaagtgggcgatcggcacggaaatgaatcttgttcagcgcctcattcactcgcacccggataaacagattgaatcattgaatcccgatatgtgtccgtgtctgacaatgaacagaatcgacctgccgcatttattgtggtcgcttgagcagcttgaaaaaggcgagccgaagggtgtcattaaagttccggaagcggttcggacagaagcgcttcgtgctttgaacagaatgctgagtcatacgtaatcataaaaatttcccctccttcccaaattttttatcatcatgcccagtccaccggcatatagtgtgaagaaacgtattgtaatgacaaatgtaccgttcacgttttgtgcataggaggggaaaacgttgaaaattcatatcgttcaaaaaggcgattcgctctggaaaatagctgaaaaatacggagttgatcttgaagagttaaaaaaactgaatcatcagcttagcaatccagacttaattatgcctggaatgaagataaaggtgccttcagaagccgttccggtcagaaaagaacccaaggccggcttcggaacgtctgcgcataagcatgagcatccatatgccaaagaaaaaccgaaatcagttgtggacattgaagacaccataccggaagaaccgaagccgtcaattccgtatgtgccgccaatccctgaaaagcatgaaaatgtgctgccggaagctgatatgaaccaatattatccgtccaatcagctgtttcagccgtggtcgcctcctaagccggaggaaccggtgacacattttgtcgagccgaaagaaaaagagcatgacaataacattccacaacaggaggaaatgatcaacatggaaaacgcgaattacccgaatatgccgaaggcgcctgaagccggaaagatggaagaagaaaacgccgcttatcatctgccgaacatgccaaacattccgaatgtcccgtttccgaatatgccggccgttgaaccgccttttatgcattacccgatgccgtgcatgccttgtccttgtccggttccggtgacaccgatgctgccgggttcgggactatgccatccgtgcttcccggtaggcggaggtttcggcggttttggaggaggttatggaggctttccggtaatgccgatgccgttaccgtacggattccatcatcacggattccatcatccgggatttgggccgcaagcgggttacggtgaatatgaaaaccaggcccatgaaaatgcagagcattatgatggttctgcatccggtttcggcggtgctccgtacggtcaaatgccgtattacggcggatattcgtctcattacgcaaacgcgcctcatcatgatgggaaatttaaggatgatgattgcggctgccatgattcacatcaccaccaccatcatcaccacggttcacatcaccatcacgcaaatatgcctgtgcagccgtatccgaatgtgggtgcaaacgccggatattttatgccttacggcggagcaaatcctaatgccgcaccgaatcagccgagtccaaatcaagtattcggacggccggaggaagaagaagattaatgtttcgggacgatgtatgtcgttcctttttttatgtccaactgaggaatggacataactgacaagcttaaacccgccgtcggccgcacatcctaaacatgagcggaaaacgctcaaacagcgatgaatccacggggggtttttccattgggtaaaaaactgatgacgatcgcaggcgttttagccgtgacggcaagcttaacggcatgcggagcaaataatgccatgaatgacggacgctacaatcagtcaacacgtccggtcggatattattcgaatgataatgataacggcagacgccagtacggaatggaccatcaaggacccgtttctgaaatgatggaaaaccgaaacggccgtcataatacgacaaacgtgtctgaccagtatgcgcctaatgacggggttccgttaacgacggacggcacatataacggccgaaatgtcaatacgccgccggcagctatgtcttataatgggtatgacaacgccgaaaacatcaggctggcggcaaaagttgcaaaccgcgtgaaaaaagtaaaaggcgtacaggatagtcaggtcatcgtgactgacacgagagtcgtcattgctgtcagaacaaatcatccttttacgaaaaatgatgataaacatgtcaaacatgcggccaaaagatttgcggacggccgtacaattcaagtgtttaccgacaacgctacttttacaaagctgcaagacatgaacagaaacagccgttaaacgggactgccggatgatttcatccggcagtatttttatggataaagcttcatcatttctttacatattcttaaaacgctctttatgttgcggtgttaacataaaagtaataaaacgtaacggaggggccggaatgaaaaaaacggagcatgacaaaagccgcggagaaaaaactgtgtatctgaccgtaaggggataccggctcaaactgacgtccggacaaatgaaactgatttcagccggccgggcataatcatcggggcagccttcataatagaggctgcttttattcggctgaaacagacaaatgaaagaaaacggttaagcaccggcatctttggtcaaactagcatcaagagtttgattgaataaagaggtgttattggtgaaacgaatttgcggtgctcgtctattgtttatgcttatcttatcggctgcagtcctgatttgcggaggaaaaggcgcatacggggcggaggttgagcattacgggccgcttcgggtgcacgtccagctggaaaaggtctatctggacggtgatgtcggcatcgaacatacggatgaaaccgttttggcgatggaggatttttgggccgcatatgcgggctggacgctcgttgagcagaaaaaaggcttcgttcttttccgtaagcatgttgatgacatttctccgctcagtaaggttaacggttatatcggcgtcacggacggaggcgtcatctccacttttcacggccgtcccggatcgctggccgagccgatccaatctttcttccagattgatatagaaaggctggaaagccgattgcaaaagcacttggaacacggcataccgtacaggacaaaagcggagtttgagagcgtgatcgatcatattaagacttacagcggatgactttgacgcaagacatgtgacacatgtcttttttttctgaatggaagatgtcaaagcgaacatacgttaacttttctataagactttggctgtttttgtgttacaatgataagcagtcaaagaggtgaataggtgtgattgaattcgtgaaggggacgattgattatgtatctccccaatacatcgtgattgaaaacggcggaatcggctatcaggtcttcactccgaacccgtttatttataaggtaagcaatcaagagaccatttttacgtatcatcatataaaagaagacgccttttctttgtacggtttttcaacccgggaagaaaaagcgcttttcacaaagctgctgaacgtcaccggcatcgggccgaaaggggcgctcgccatcctcggttccggtgaccccggagccgtcatcgaagcgatcgaacaggaagatgaagcctttttggtgaaatttccgggtgtgggcaaaaaaacggcgcggcagattattcttgatttgaaaggcaaactggccgacgtcgtgcctgaaatgattgacaacctgttcaatcatgaagcgcgcattgaaaaacaagaggctgaaacggcgcttgacgaggcgcttgaagcgcttagggttctcggctacgccgaaaaagaaattaaaaaagtgcttcctcacttaaaagaggaaacggcgctttcaacagatcaatatgtgaaaaaagcattgcaaaaattattaaagtaaggtgatgttcatggatgaacggctcgtttcaagtgaagcagacagccatgaatcaataatcgagcaaagcctcaggccgcagaatctcgcccagtatatcggccaaaagaaggtgaaagaaaatctgcgcgtgtttatcgatgcggcgaaaatgaggcaggaaacgctggaccacgttcttttatacgggcctccgggtctcgggaaaacaacgcttgcgtctatcgtggccaatgagatgggggtggagatgcggacgacgtcaggtcccgccatcgaaagaccgggagatttggcagccatcttgacggcgctcgaaccaggggatgtgctgtttatagacgaaattcacaggctgaaccgctcgattgaggaagtgctgtacccggcgatggaggatttctgccttgatatcgtcattggaaaaggcccgtccgcccgctccgtccgtctcgaccttcccccttttacgcttgtaggagcgacgacaagggtcggattattgaccgcaccgctcagagaccggttcggggtgctgtcgcgtcttgaatactatacgcaggaagagctgacagatatcgtgtcaagaacggctgacgtttttgaagtggatatcgaagaagctccggctctggagatcgccagacggtcaaggggaacgccgcgggttgcaaaccggcttctcagaagggtgagagattttgcccaggtgctcggcgacagccgcatcacggaagaaatcgctcacgacgcgctcgaacgtcttcaagtcgatgcgctcggccttgaccatatcgaccataagctgctgatgggcatgatcgaaaaattcagcggaggtcccgtcggccttgatacgatttccgcgacaatcggcgaagaaccgcatacaatagaggatgtgtacgaaccgtatctgctgcagatcggatttctccagaggacgccgaggggacgggtcgtgactccggctgtgtatgaacattttcgattggaggcgcccgcccgtgactgactttccgaaggttctcatggttctcggtgccgttttgcttattgccggcgcagtctggcactttgtcggaaggctgcccggagatattttcgttaagaagggaaatgttacatttttctttcccgttgtcacttgtattgtgatcagtgtgatactatccattctgcttaattttttcggcagaatgaaataacaatagacagaataaaggtgaaatgatgaaagtcgatttatttgattttgaactgcctgaacgcctcattgcccaagtgccgctgaaagaacgtgacgcatcgcggctgatggtgctcgacaaacagacgggcgggctgacggacagttcatttaaagagattgtaagcttttttaatgaaggggattgtctcgtcttgaacaatacccgtgtgctgcctgcaagattattcggcacaaaagaagatacgggagcgaaagtggagcttctgttattaaaacaggaagaaaatgatacatgggaaacgctcgtaaagccggcgaaacgcgtaaaaaaaggaacggtcctgacatttggcgacggccggctgacagcggtctgcacggaggagcttgatcacggaggcagaaaaatagaattccggtatgacgggattttttacgaagtgcttgaatcactcggtgaaatgccgctgcctccttatattaaagagcagcttgatgataaagaacggtatcagaccgtcttttcaaaagaaatcggatctgccgcagctccgacggccggacttcattttacggaagagattctggacgagctgaagcaaaagggtgtgcggattgaatttatcacacttcatgtgggactcggcacattccgcccggtcagtgcggatgatgtggaagagcataacatgcacgcggaattttatgaaatgacggaagaaaccgccgcctctttaaacgaggtcagaaaggcgggagggcgcatcgtgtcggtcgggacgacatcaacgcgcaccctggaaaccattgccggcgagcatgacggcgtatttaccgcttcaagcggctggacgtccatattcatttatccgggatatgaatttatagcgattgacggcatgatcaccaattttcatctgccgaaatcttcccttatcatgctcgtttctgcgcttgccggcagagagcatgttctttccgcctaccgtcatgcggtagaagaggaataccgtttcttcagctttggcgacgccatgctgattatctaatttgaagacaggaggcctcatacaaagtggctgaacaaccgatacgttatgaatttataaaggaatgcaaacaaacgggagcgcggctgggcagagttcatacgccccacggctcctttgagacgcctgtatttatgccggtcggcacgcttgctacggtaaagacgatgtctccggatgagctgaaatctatggatgcgggcattattttaagcaatacgtaccatttatggctccgcccgggacacgacattgtaaaagaagcgggcgggcttcataagtttatgaactgggaccgcgcgattttaacagattccggcggttttcaggtcttttcattgagcaagtttcgtaatatagaagaagaaggcgttcatttccgcaatcacttaaacggagacaagctgtttttatctccggaaaaagcgatggaaattcaaaacgccctcggctctgatatcatgatggcgtttgatgagtgtccgccgtatccggcagagtatgattacatgaaacgctctgtggaacggaccagccgctgggcggaacgctgcctggaggcgcacgggcgctcagatgagcaggggctgttcggaatcgtacagggcggagaatacgaagacctgcggacacaaagtgcaaaagacttggtttcgcttgattttccggggtatgccataggcggattatctgtcggcgagccgaagcacgtcatgaaccgagtgcttgagtttacaaccccgcttttaccgaaggacaagccgagatatttaatgggtgtgggttcaccggatgccttaattgacggcgccatccgcggcgtggatatgtttgactgcgtactgccgacccggattgcccgaaacggcacggtgtttacgaatgaagggcgtctgaatatgaaaaacgccaaatatgagcgtgatttccgtccgattgacgaagagtgcagctgccatacatgccaaaattactcccgcgcttacatcagacatttgatccgctgtaatgaaacgtttggaattcgattaacaacttaccataaccttcattttctgttacacttaatggagcaggtcagacaagccatccgggaggatcgtcttggtgatttccgagaagagttctttgagcgttacggctataataagccaaatgcgaaaagcttctaaataaaaccattcatgaaaggagggaaacagatgggtactttaggcacaatcgttcctattattttaatgtttgcagtgctttatttcctgctcatccgtccgcagcaaaagcagcagaaggccgtccgccagatgcaggaagagctgaaaaaaggggattcagtggtgacaatcggaggattgcacggcactgttgattcaattgatgaaagcaaggtcgtcattaaaacaggtgataacacccgtttaacatttgaccgccgcgcaatcagagaagcttccgctgaataacagcgaagctcatacatacaaaaaaagagcggagaatccgctctttttttattacgctgatctgcttcctttcaaattcactccgaaaatgccgcccagcatactgactcccaaaaagccgagatgaaacaaaagctgaccggatgtaaacgtttttccgaaccctaaatattgaaaaagcaagatgattaatgaaaaacagacggcggttaacgctccgatcatccagcctttttccttcgctttgccgcccgatataaaacctcccgcaaataaagaaagaaaagaaagcgcggtgatcagccagctgaaagatgattcttccattgaggtgactgtcagtaaaagcgaaatcgccaaactcgtaagaagcatcaccgcaaaaatagccactaagccgtacaaaacgcctcttcccacttgtttcgtttcttccatttttatctcctctccgctctgcggcctgatatatgacaagccggagcccgtctttttctaaatgtattctctgaatgttcgaattagacgtaaatgcatgatgttcagcccgtttcttacataattcagagccgatggcaaatgctatgaccgttggaggtgcgatatggaagatattttcattattacgtttcgtacgattgtgctttattttatcattcttgtgattttcagactgatgggaaaacgggaaatcggagaactgagcattttagaccttgtcgtctccattatgattgccgagattgccgtattggcaattgaaaatgtaaaagataagcttttgcatacaattgtgccgattgtcgttttaatgattattcaagtaagccttgcttttatttcgctcaaaagccaaaaaatacggcagctgcttgacggaaaacccaccattattataaaacagggaaaaattgatgaacgggcgatgagatcgcagcgctacaattttgacgatcttcttatgcagctgagggagaataacatcgatagaatctctgacgtatcgtatgccattttggagtcttcgggcaaactgtcaatcgtcaaaaagaaaaacaataaggataagcagatggaaacatcgcttatcgttgacggggtcattcagaacgagcatctggacagaatcgggaaagataaacactggcttgaaaaaaatttagcaaaaagaggatatcgcgatctttcggttatatcattctgcacgtttacggacggcgctttttttattgatctcaaagatgaaaaaggggagccataaatcggcttcaccgcgtcacgaacttgccgatgaccggaatccggatcagctcttcccttttaatcagcctgaataacagcagcagcgcaatgtacaaaatcgcggtcattgcaatccagcctgtgagattaacagcctctgatcctgaaaaatgaacggtgtgcttgatgatgcggctgacataaccgcaaatgaatatgacggcaaaacagagcgcgtattcttttattttaatgctgatcggaagcaccttgcttacggtggccgcatgcagcagggtgacaaggaccatccccgttacaatcgcaagtgcggcgcccatgatgcctaaggaaggcctggtcgccaaaacaaaaattaggccggttttgacagcggcgccgataaaactgttcatcatggcggccccggctaaattgagagcctgcagcaccgcctgaagaggcccctgaaaatagtaaagcagaaaaaacggcgccatcactttaacaaataccgccgcattagttgatccgtacatgacggacatcagttcatcagcgaaagagaataaaataaccaccgaaatgcctccgcttaaaagacacagcctcatcgcctgttccagacggtattctacaacttgcagctttttttgctccattccttcactgatcgcaggaacaagcgccgttgacagagaataggttataaagctgggcagcgtcaaaaccgtcatggcaaatccggtcagctccccgtactggctggtggcggcagcggtggccactcctgcaatcgcaaggctctgcgcgacgacaataggttcaaaaaaccaagataaatttccgatgaagcggcttccggttgtcgggagcgacacgctcatcagctggcggaaggtttcttttccatttgcaatcgacttgaaaaattgttttctgattctgattgttttatttgctttaaaacaaatgaataaataaataagagaggcaagctccccgatgacagacgaaatcatggctcctgctgcggcatattcaatcccgtacggcagaaacaccgtcgtgcagactgcgacaagtgaaatccgcacgatctgctcaagcacttgggaaaacgccagcgggttcatattctgcctgccctgaaagtaaccgcgcagcacgctggatatcgcgataatcggcacgacgggcgtaatcgccagaagcgggaaaaccgtgcgctgatccgtcagcatcgtttctgacataatcggcgcaaagcataaaaacagcggcgtgaagatgagacttaatatcccggtgacggtaagcgccatcactaaaatgtgtttcattttctgccggtccccccgcgcgcttgcttcagcgacaagtttgctgatggcaacggggaggccgaattgagtcaaagtggtggccaagaaaaatgtcggggcagccatcatgtataaaccgaccccttcttcaccgataaaccgggcgataaccacccggttgacaaagccgagcattctcgtaatcatcccggctgcaatgagaataagagtgccccttaaaaaagtctgttttgccattttataaacccctgccttctcaaactacctggaatcatatacaataaagatatgcgccgatgtcgtccgagcatgacaagtcttcgagaaaaatggaaaaaggagcgagcgcccagtggagaaacatcccgccgaaatgtacaaagatcatttgcggcctttcttgtacagtaaacttgaagagttcaaaatccttggatacgatgatgttgagcacgagagtttatggtcatacttaatacataaaaagtggaaacagaaaaaggaattgccgctgcatgaattggccggtaatattttatcagttaaaattggcgattttatgaactatgcaaccgttgaagcttttaagtcgtctaattggctggaaagcgatgagggtcaggaagctttggatgaactgctgagataatgatttgacggcataggtttaaggaggaaatacataatgaaaaaaggacgcttgattgcgtttttcctgatcgtattattgatcggcacagggctggggtattttacaaaaccggctgccaataatattacgttaggattggatttacgcggcgggtttgaagttctgtacgatgtgcagcccgtcaaaaaaggcgataaaatcacaaaagacgtgctcgtcagcacggtgcaggcgctgaaccgccgggctaacgttctcggcgtaagcgagccgaacattcagattgaaggaaataaccgcatacgcgttcagctggcgggcgtcacgaatcagaacagggcgcgcgaaattctgtcaacggaagcgcagctctcgttcagggatacgaatgataaagagctgttaaacggctctgatctcgtggaaaacggcgcgaagcaaacctttgatccgacgacgaacgaaccgattgtcagcgttaagctgaaggatgcggataagttcggagaagtgacgaaaaaagtcaagaaaatggcccctaataatcagcttgtgatctggcttgattaccaaaagggcgattcatttaaaaaagaagtcggcaaaaaacatccgaaatatgtatccgctccgaatgtgagccaggaattaaacacgaaggatgtcacgattgaaggtcagttcaccgttcaaaaagcgaaggacttggccaatattttaaacgcgggtgcgctgcctgtgaaactgaccgaaaaatactctacttcagtaggggcgcaattcggacagcaggctttgcatgatacggtagaggccggcatcatcggtattgcaattgttttcttatttatgctgctttattacagactgcctggactcatagcggtcattacgctttctgtatacgtgtatattacgcttcaagtgtttgactggatgcaggcggtgctgacgcttccgggtattgcggcgctcattttgggtgtcgggatggcggttgacgccaacatcatcacctatgaacggataaaagaagaactgaaactcggcaaatccgtccgctcagctttccgttcagggaacagacggtcatttgcgacgatctttgatgcgaacatcacaacgatcatcgcagcggtcgtgctctttattttcgggacaagctctgtaaaagggtttgcgacgatgctgattttgtcaatactgacaagctttattacagctgtcttcctttcaagattcctgctcgcccttcttgtggaaagcagatggcttgaccggaaaaaaagctggttcggcgtcaagaaaaaacatattatggacattcaaaaaacagatgaaaatactgaaccgcatacggcattccagaaatgggatttcacgagcaaacgaaaatatttctttattttctcaagcgctgtaaccattgcgggaattatcatcttactggtctttaaactcaacctgggaatcgattttgcaagcggtgcgcggattgacgtgcagagcaatcatgcattgacggcgcagcaggttgaaaaagactttgactctctcggcatggatccggaaaacatcgtactctcgggtaaagagaaccatgttgccgcggcccggtttgtcggagagccatccaaagaaaaaatcgctgaaatcaaaacgtactttaaggacaaatacggatctgaaccgaacgtcagcacggtatcgccgacagtcggaaaagaactggcccgtaatgctttatatgccgtggcaattgcatcaatcggcatcattatttacgtgtcaatccgtttcgagtacagaatggcaatcgccgcgattgtatccctgctgtatgacgctttctttatcgtcgcgtttttcagcattacaaggctggaggttgacgtaacctttatcgccgctattctcaccataatcggttactcgataaatgatacgatcgttacatttgaccggatacgcgagcagatgaaaaaacgcaagccgaagtcatttgccgatctggaacatatcgtgaatctgagtttgcagcaaacctttacacgttcgatcaatacggtcttgaccgttgtgattgtggtcgtcgtgctgctcattttgggctcatcgtcaattacaaacttctccgtcgctttattggtcggtttattgacgggcgtttattcctctctttacatcgccgcgcagctgtggcttgtatggaaaggaaaagaatttaaagggaaaaaatcaatcgaagagtaaaaggaaacaggctgtcttccggaaggcagcctgttttttttaggccgcattgaacttaaaacctgcatttgctataatgacatacgcttacataatcaatcatcattgttaaaacatgtaggggggttcttatgaacgttcgtgagtcggagcttccgggcatcggccagaaagtagaagtcattacgaaaaatcacgataaaatcagtattattcttcatgatgacggcagaaaagagctctattacttcgatgagaatgattatgacgaatgcttggcatccgttgaatttaacgacgaagaggcgaggcagatttccgctattttaggcgggatgacgtataagccgaaagcgctggaatctgtggaagtcgcgcttgatgacctcgtcattgagtggtttaaagccgaatctcatgcaccggctgtcagccgcacaatcggagatttggagatcaagaaacattacaacgtccagattattgcgatcgtgaagaaaaaccggcaaaaacagctgagccccggcattgataccgtaattgaagaaggggacaccctcgttatatcgggagaaagaagcggactgaaaaagctggtccgcgagcaattaacggcccggatttcctgagaccggggtttactcccgggaaaatgggggaaaagataagaatcaataattgggggcagacgcatgaataaacaatggactattatattcgctttactatttactctgattgtcgccatctttgctgtcattaacgtgcgggcggttgaggttgattatctgttcggaaccgctgaatggccgctgattttagtcattttaggctctgtgttaatgggagcgctgatcgtgttttcagccggtatatttcaagtgatgaaactgaagcgcgaaattaaaatgctgcggaaagaaaacagatccgcaggtgaattgacggctgattcggacggcaaaaaaacagccgcgccgccggaagaaatgcttgaagagaaaaaaggatcagaataacatttgaaacccctcagtccgctctagtataatagggtggttgaggggtgaatttatgttagcgtcaaaaatgcgctgggaaatccagcagccggatcaggaaaaagtcaaatcactcacagaacaattggacataacacctcttgtggcatcactgcttgtaaaaagaggttttgatactgccgaaagcgcaaggctgtttttacatacaaaggatgcagacttttatgacccgtatgaattaaagggaatgcgggaagcagttgatcggataaaactggcggtttctcaaggggaaccgattatgatttacggagattacgatgcagacggcgttacaagcacgtcagtgatgctgacggcactcagacagctgtcggcggacgttgacttttatattcccgaccgttttacagaaggctacggcccgaatgaacaagctttccgttccataaaagagcggggattttcgctgatcattacagtggatacgggaatcgccgccgtccatgaagctgaagtcgcaaaagagctgggcttagacgtcattattaccgaccaccatgagccgggacccgagcttcctgacgtatttgcgatcatccacccgaagcagccgggatgcggctatccgtttaaagaattggccggcgtcggtgtggcgtttaagcttgcccacgcgcttacgggttctttgccggaagctatgctggacttggcggcaatcggtacggttgcagatctggtgcctcttcatgatgaaaacagattaattgcgtcactcggaattgaaaggcttcgtacgacaaatcggccgggcctcaaagctctgattaagctttccggcggagatatcggacaagctgatgaggaaacgatcggatttcaggtcgcaccgaggcttaatgccgtcggaagaatagaacaggccgatcccgctgtgcacctgctgatgaccgaagatcagtttgaagcggaggaactggcttcggatattgaccggctgaataaagagcggcagaaaatggtgaaaaccatgaccgaagaggctgttgaaatggtacagcagcaaggcggaaacccgtctgccattgtagtggcaaaagccggctggaatccgggtgtcgtcggtattgtcgcatcgaagctggctgaacgtttttaccggcccgctgttgtgcttgggatagatgaggagcagggaatcgccaaagggtcggcgcgaagcatcagaggcttcaacctttttacgagcctttcacagtgcagagacattcttcctcatttcggcgggcatccgatggcggccggaatgacgctgaaggctgaagatgtggcggaattaagggacaggctgaatcaaatggctgaagaaacccttacggaagaggattttattcccgttcaggaggttgatcttgtctgcggcgttgaagacataaccgttgaaagcattacagaattgaatatgctgtcgccgttcggcatgcttaaccctaaaccgcatgtgatggtgaaaaatgccgtgcttgatgatgtgcgcctgatcggagcgaataaaaaccacgtgaaaatgacggtgaaaagtgattccgccgtccttgactgcgtcggctttaacaaaggagagctggaagccggagttgttcccggatcaacgatttccattgtcggcgagatgtccattaatgaatggaacaacagaaagaagccccagctgatgattaaagatgctgcggtgccggaatggcagctttttgatattcgaggcaagcggacgtgggaagatacggtcaccgcactgccgaaggaaaaacgggtgctcatcagctttaacgaaaaaaccgctcagaagctccgtgaaaaagagctgacgggcgagcttgccgagatcacttcggaatccgaggcggaagctctccagcttgacggaaaatatgccgtttttctggatgtgccgccgtcagcggatcgcctgcagcatttgcttgacggaaagaagccggaacggatttattttgtttttatcaatcatgaagaacatttcctgtcctcatttccatcgcggaatgatttcaagtggttttacgcatttctcttgaaaaggggcgcttttgacttcggcaagcatggttcagagcttgcgagacacagaggatggtcaattgacacaatcaatttcatgacaaaggtgttttttgatctcggttttgttaaaatagaagatggtgtgctgtctgtcgtgagcggtgcgaaaaaacgcgacctggcagattcgcaaacctatcaggtaaaacagcagctgatggaattagaccagaagctcaattattccgcagcccatgagctgaaggaatggctgaataagctgatgaaccaaggttcagaggcttatgaaagtacgaggaggacatagaacagatggatcttaaaaaatacgtaacaattgtgcccgattacccgaaagaaggcgtacaatttaaagatattacgacattgatggacaaaggcgacgtataccgttacgccactgaccaaattgttgaatatgcaaaagaaaaagaaattgatttagttgtcgggcctgaagcgcgcggctttattatcggctgtccggttgcatacgcactcggagtcggctttgcgccggttcggaaagaaggaaaacttccgcgtgaggtcattaaagtcgattacggtttggagtacggaaaagacgtactgacgattcataaagatgcgatcctgccgggacagcgtgtgctgattactgatgacttgcttgcaacaggcggcacgatcgaagcaacgattaagctagtcgaagaactgggcggcgtcgtagccggtattgcgttcttaatcgagctttcttaccttgacggcagagacaagcttgacgattatgatattttaacattaatgaaatattaaccgcatatggaaaaaagcactcgtgtcagggtgcttttttcctattatttcatcatcctgacagattctttaggtgttttgaacttctgccctttacatctctcgtttttttcttgataataaactaatacagtttacatttaaaaaaggtgattccatggcgaacgaacaagtattgactgccgagcaagtaatagataaagcgcgcacttatctgccggaggagcagattgcgtttgttgagaaagcttacctgtatgcgcaaaacgcgcatcgcgaacagtaccgcaaatcaggtgagccgtacatcattcatccgattcaggtggcggggatcctcgtcgatttggaaatggacccttccacaattgcgggcggatttctgcatgatgtggtggaggacacggatgtcaccctcgacgacctgaaggaagtattttctgaagaagtggcgatgcttgtcgacggcgtgacgaagctcggtaaaattaagtataaatctcaagaggagcagcaggcggaaaaccatcgaaaaatgtttgtcgctatggctcaggatatcagagtcatattgatcaagctggcggatcgccttcacaatatgcggacgttaaagcatcttccgcaggaaaagcagcggagaatttcaaatgagacgttggagattttcgctccgctggcccatcggctcgggatttctaagatcaaatgggagctggaagacaccgctctccgttatttgaatcctcagcaatattacagaatcgtcaacctcatgaagaaaaagcgcgcggaacgcgaactttatgtcgaagaggttgtcaatgaagtgaaaaaacgcgttgaagaagtgaatattaaagcggacttttcaggacgtccgaagcacatctacagcatttaccgcaagatggcgctgcaaaataaacagttcaatgaaatatatgatctgctcgccgtccgtattcttgtcggaagcattaaagactgctacgccgtactcggcattattcatacgtgctggaagccgatgcctggcagattcaaagattatattgcgatgcctaagccgaatatgtatcagtctctgcatacgaccgtaatcgggcctaaaggcgatccgctggaagtgcagatcagaacgtttgagatgcatgagatcgctgaatacggggtggccgcacactgggcttataaagaaggcaaggctgcaaacgaagaagcgacatttgagaaaaaactgtcctggttccgtgaaattctggaattccaaaacgagtctacggatgcggaagaatttatggaatcgctgaaaatcgatctgttttctgacatggtatacgtatttacgccaaaaggcgatgtcattgaactgccgtcaggctctgtgccgattgatttttcctacaggatccactcagagatcggcaacaaaacaatcggggcgaaagtgaacggaaaaatggtgacgcttgaccataagctccggacgggcgacatcgtcgagattctgacgtccaagcattcttacggtccgagccaagactgggtcaaactggcgcagacgtcccaggcgaaacacaaaatacgccaattctttaagaaacagcgccgtgaagaaaatgtcgaaaaaggccgtgagcttgtcgagaaagaaattaaaaatcttgattttgaagtgaaagatgttttaacgctcgaaaatcttcaaaaagttgccgacaagttcaatttctcaaatgaagaggatatgtacgcggcggtcggatataacggcattaccgctcttcaggtggccaacaggctcaccgaaaaagaacggaagctgcgtgaccaggaagagcaggaaaaaatcgttcaggaagtcacttccgagccgaaacattatcctcaagggagaaaacgggaagcgggtgtgcgcgtaaaaggcattgacaaccttctcgtccgcttgtcgaaatgctgcaacccggtgccgggcgaccatatcgtcggttttattacaaaagggcgcggtgtatccgttcaccgggacgactgtccgaacgtcaaaacgaatgaagcgcaggaacgtctgattcccgttgaatgggagcatgaatcacaggttcaaagacgcaaagaatataacgttgagattgagattttggggtatgaccgtctcgggcttttaaatgaggtgctccaagccgtaaatgaaacgaaaaccaacatctcctctgtctccggcaaatccgaccgcaataaagtcgctacgattcatatggcgatttttattcaaaacattaaccatctgcacaaagtggtcgagcggattaagcagatcagagacatctattcagtccggcgggtaatgaactaaaaggagcttgctatgaaattagttgttcagcgtgtaacagaagcgagtgtgacggttgacggcgctgtcgccggccggatcggacccggtattatggcgcttgtcggcatcactcatgaagatacagaagaagatgccgcttacttggcggataaaatcgtgaatcttcggatatttgatgatgaaagcggcaagatgaatttatcgcttttggatacgggcggggagattttatccgtttcccagtttacgctttacggcgaaacaaagaaagggagacgcccgaattttatgaatgcggctaaaccggatcaggctgtgctcctttatgaaaagtggaacgaactccttcgggaaaaaggagtcaaagtggaaaccggaatattcggagccatgatggatgttcagctgacgaattccgggccgattacattgattatggattctaaacaataaaaaagctgccgttcggcagctttttttttatgattgaaaataatgttccaatccgctttcaattccgtctgtcactttttcctgataagagccgctatgtatgattgtttcttcttgcggttgactgagatagccgagctcatacagcatggcaggccgtttattttccctcaggacgtaataatcgccaaacagaacgccgcgatcaggaataggggaacgcttcactacttcagaatggacgtctgaggcaagctggcggtccttagacggactgtaataataagccgtgcttccccgcgttgacgtatcggcataactgtcatagtgaatgctgataaaggcatccgcattccggtaatgagaggttgaaaccctggcctgcaggctgataaatgtatcatcctgtctggtgatatacacgtttgcaccggccgctctcaattttccggctaacagcttagctgttttaatcgttacgtttttttcaaactttccggagtagccgatcgttccgctgtcttttcctccgtgtccgggatcaacgacgatcgttttgtttttaagtgagccgctgccgcctgacgtgttgggagaaggtgcttcgcctgtttcctcaccgctttttgacgtttgtacgacccagtctgccacatatgcggtttgtccgttttcaagccggacttcataccatttgccgcttgagccgacaatcgggtaggctgcgcctttatctgccctttttacgatagaagcggaagtcgaggccgagctccttaagttggtgccgccgtaaacaatatacgcttttttcgaggagcctgagcccgcagaaccgtctcccgagccggatgcgctgcccgatgagtcagaatcctttatgatgtagtggcttgctgcccagcctttttgcccgtttgcttcaattttcagccagccgtggtcttcacttaagatggaaacctttgttccgcgtgataatttagtcataatcgctgaatcatgtgacgctgcacttctgacattcaatgaagaaacgccgaccgtcccgctttttgacccgcttcgggccgaagttgctttcgtatccgatccgccgctgtccgcggtgacgtattcggaagaaacccacccggttgtgccttgataagaaatgttcacccatccgctgttcttgtccagcacggatgcatgcgcgccttgcggaagtttgccgatgacttcatacgatgtccccgggccttttctgatgcggaggtcaggatcggtggaagtgaccgttccgctttttgcggatgaattgtctgctcccccggctgtttttgatatcagccaggaaacgacccatccggttttaccggggctcagctgaagctgtacccagtctccctcttctttaacgatcgggtatctttcccctttttttacttcagcctttattccgtagctcaggccgggaccgcctctgacattgatcttgtctgtcgcgatgaccgcttctccctctgcggcgattgcggtgtgaaatgacggaagaagcgctgtgatgatgacgccgcataaaataagagcaagagttctcttcttcatggctgtcctcctttctgaactaactaaaatacattcttgtataatatcgtattttccttgctgaatgttaaataaaaataaaatggtttgtttatactagtcataaatacagcgaaaaggtgtgcaaatcatgaaatatcaaccaaaaatgggacgcgcgctgcacgatgcggaaggaaatctgcacttcagtgatcagagcgatagagaaaaggcgggttttcttgaagagacggcgacggagttcggtctcttatcgaaagaagcggtcgcaaggaaaaacagacggaataaaacttgacaggggagtgcaatcccattattataatagaaattgatgtacataactcatgataacgattttgaaccgataatggagaagagtaggtcagaatgcatggaaaagagaggaaccgtcccgggctgaaagcggatccgcactgcatctttctcgaaacaacactccggaggttccctgctgaacgcttttgcaagtcattaggcagcggacgtgaacctgcgttaaaggtcagagcggggatgcttcggcattccaactagggtggcaccacgggtataactctcgtccctactatacatgtatagtaggagcgggagtttttttatttgaagaaagacattaaggaggcctgtaacatggcatatcacattccaagaggcacacaggacatactgccgggtgaatcagacagatggcagttcgtcgaacaaattatgagggagacgtgccgcacttatcaatataaagaaatccgcacgccgatcttcgaacatacggaattattcgcaagaggcgtcggtgagtctacagatatcgtgcagaaagaaatgtacacgtttgaagaccgcaaagggagaagcttgacgcttcggccggaaggaacagccgccgcagtccgcgcgttcaatgaaaataaattatttgcgaacccggtgcagccgacgaagctttattatgtcggaccgatgttccgttacgaacgtccgcagacagggcgtttccgccaattttatcaattcggaattgaagcgatcggctccaaagatccggccgtggatgcagaagtcattgcgcttgcgatgagtatttaccgtaaagccggtttgaaacatgtcaagcttgtgctgaacagccttggtgaccaggagagccgcaaatcctaccgggaagcgctcgtcaaacattttgaaccgcgcatcggagaattttgctcagactgccagtcgcgtctgcacacaaacccgctcagaattcttgactgcaagaaagacagagagcatgaactgatgaaaacggctccgtccattcttgattacttaaatgaagaatcagccgcttattttgagaaagtaaaacaatacttaaacggtctcggcatcccgttcgaaatagatccgaaccttgtcagagggcttgattattataaccataccgcttttgaaattatgagcaatgccgaaggattcggagcgattacaacccttgccggcgggggccgctatgacgggcttgttgaacagatcggcggacctgaagcgccgggtatcggatttgcgatgagcatcgaacgactgctggcagccattgacgctgagaaaacagaccttcccgtcaatcaggggatcgactgctacatcgtgacgctcggagaaaaagcgaaggattattccgtttccctcgtgtacaaactgagagaagcgggcatctcaagtgaaatcgattatgaaaataaaaagatgaagggccaattcaaaacggctgaccgtctcggcgcacgttttattgcgattttaggggaagatgagcttgcccaaaataaaatcaatgtaaaagatgcggaaacaggagagcagcgtgaagtggtgttagacgagctgatacaagtgttaaaggcagatcaaaagcagtgaaggagaggaacgctatgtttggaagaacatattattgtggcgagataactgaaaaagcgattggcgaaaccgtcaaactgaaagggtgggtgcagaagcggcgcgatctcggcggcttgattttcattgatttgcgtgaccgctcgggtattgtgcaagtcgtgttcaaccctgacgtatcgaaggaagcccttgccgcagcggaagcaatcagaaacgaatatgtgcttgatatcgaaggcacggtttctgcccgtgaagaaggcacggtgaatcccaacctgaaaaccggtaaaattgaaatcaaagctgaagcggtgacggtgctcagtacggcgaaaacgcctccgtttccgatcagtgaccaggcggctgacgtttctgaagacgtccggttaaaacaccgctatttggatttgcgccgcccggcgatgtttcaaacattgcaaatgcggcatcaagtcacaaaatccatccgccatttcttggatgaaaacggatttcttgatattgaaacaccgattttaacaaaaagttctcccgaaggcgcccgtgattacttagtgccgagccgggtgcatgaaggggaattttacgcccttccgcaatcgccgcagatttttaaacagcttctgatggtgtcgggctttgaacggtattatcaagtggcccgctgcttccgcgatgaagacttgcgtgccgaccgccagccggaatttacgcagattgatattgaaatgtcctttatgagtcaagaggacatcatggctctggcggaagagatgatggcgaaagtcatgctcgaaacaaaaggcgttgaagtatcgcttccgcttccgcgaatgacatatgaagaagcgatgaacagctacggttccgacaaacccgatacccgcttcggcatgctgctgacggacgtgtcagacatagtgagagatactgaatttaaggtgttctcatcagccgtggcaaacggcggcgttgtaaaagcgatcaatgtcaaaggcgctgccggcgactattccagaaaagatatcgatgcgctcggcgtttttgccggaaattacggcgcgaaaggtctcgcttgggtgaaagtagaagctgacggcgtaaaaggcccgattgcgaaattctttgatgaagagaagcaggcaaaactggctgaagcgcttgatgcttctgaaggcgatctgctcctgttcggcgctgataagtttgaggttgtggctcaatccctcggcgcgcttcgcttaaagctcggcaaagaacgcggcctgattgacgaaagcctcttcaacttcctgtgggttgtggactggccgttattggagcatgacgaggaagaaggccgtttctatgcggctcaccatccgtttacaatgcctgtccgtgaagatcttgacctgattgaaacggcgcctgaagatatgaaagcgcaggcttacgacctcgtcttaaacggctatgaactcggcggaggctcaatccgtatttttgaaaaagacgttcaggaaaaaatgttcgggcttctcggctttacaaaagaagaagcggaggaggagttcggataccttcttgaagcctttgaatacggcgctcctccgcatggcggaatcgcgctcggcttagaccggttggttatgcttcttgcaggccgcactaacttaagagatacgatcgctttcccgaaaacggcaagcgcaagctgccttcttacggaagcgcccggcgaagtgagcgacgcccagcttgaagaacttcacctttctgtcaaaagaaaagtgaaacagtaaagatcggcagtttgtttcttgaaaatcaaaatctgctgtgatatgattttgacaagttaaataaagtcctgatgtgttagttgtacacctagttttgaccgaacatttttttgatttgggagcccgcatttttaaatggcgtacatgcctcttttcattcgctaaagaggacttacaagatttaaaaaagggcacccacctgctgagagcgggttcaaaacgaaggaaagctgcaacggcacaattgggactttattttttgtgcgctaaaaccagcggctttttgacaagccgagtttataaaaccagaatgtggagtgaggttcttgttacatcagttttccagaaatgagctagcgattggaaaagaagggctggacacgttaaaaaacagcacggtggccgttctcggcgtcggcggagtcggttcattcgcagccgaagcattggcgaggtccggagtggggcggatcgtgcttgtcgataaagatgatgttgacattacaaacgtaaaccgccagctgcatgcgctattgtcgacggtgggacagccgaaaacagaattgatgaaagagcggatcgctgatattaatccggattgtgacgtcgtcgccttaaaaatgttttatacagaagagacgtatgagcagttctttgagtatccgctcgattacgtcattgacgcgtcggatacgattcattataaaattcatctgatgaaagaatgtctgaaacggaatgttccgctgatttcaagcatgggagcagcgaataaaacagacccgacacgctttcagattgctgatatttcaaaaacccatactgatccgattgccaaagtcgtccgcacaaggcttcgtaaagagggcattaaaaaaggcgtacaggtcattttttctgatgaaagcccgatcgtcatccgtgaagacgtcagaaaagaagtcgggaatgatgaagcgaaaatccgcaaagcgcaaatgccgccgtcttccaacgcctgggttccgtcagtggccggtctgattatgggcggacatgttgtcatggagctcttaaaggacatcgacattaaacgggttaaagataagtaaaaagaaaaacagccttcttcaggaaaggctgtttttttatttgaatccgccgtttacacgaaagatcttgtccggttattttttctgcttcatcagtttttcatacacttgctttatggcggcttcaaatttccccgtttgtttcggtttatagtattgcttgttttttaacggatcgggcaaatattgctgttcgacccatccgttctcgaaatcgtggggatattgatagccgatcccgcgtccgagctcttgggcccctttatagtgggcgtcttttaaatgtttcggcacatcgccgattttacccgtcctgatgtctttgagcgcctcatcaacggctgaaatggcggagtttgatttcggtgagaggcataattcgattaccgcattggccagcggaattctcgcttccggaaagccgatccgttctgcggtctgaatcgcgctcagcacccgggggcctgcctgcgggcttgcgaggccgatatcttcataggcgatcacgagaagccttcttgatatgctttcaaggtctccggcttcgatcagacgggccagataatgaagggcggcgtttgcgtccgagccccggatcgatttttggaacgcggataagacgtcataatgcgcatcgccgtttttatcatgggtatagctttttttctgcagacattcttccgccgtttcccgtgtaatccggatcgtcccgtcgcttgattcctttgtggagagcacggcaagctccagtgcgttcaaagcggagcggacgtctcctccgcacccttgtgcgaaatgatccatcgcgtcgtcgtccaccgaaacgctgtaggaaccgagtccccggtgttcatctgtgagcgctcttttcaatgcctgcctgatcagatcgggtgttaacggttcaagctcaaatatctgggtccggcttctgatggccgggttaatggcatgataagggttggcggtcgtcgcgccgattaaaataatcatgccgttttctaaatagggcagcagaaaatcctgctttcccttatcaagtctgtgcacttcatcaaggattaaaatgacctggcctgacattttcgcttcctgtacgacaatctccatgtcttttttattatgaatgacggcattcaatttcctgaatgcgatgcttgtcgatcctgcgatcgctgtggcgatggacgtttttccgatgcccggcggtccgtacaggatcatggatgataagtgcttcgcacgcaccattctgccgatgattttatcttctttgaccaaatgttcctgaccgataatgtcttcgatattggcaggccgcatccgatacgccaatggtttcatgaacatctctccttacatatacagggtaacggaaaacggacgattagaaaagcgaattgcggcgggccccgtgtttcaatgaaaattaggataagttatgttataataacagttggtctataagatactaaacagattattcatatccatttacttgtataaattaacaattagaattgactggggtgttcatattgaaaatatcgacaaagggaagatacgggctcaccattatgattgaattggcgaaaaagcacggagacggtccgacgtcgctcaaaagcatcgcccaaacaaacagcctttctgagcattacttggaacagcttgtatcaccgctcagaaacgccggactcgtaaaaagcatcagaggcgcttacgggggttacgtgctcgggggccagcctgaagagataacggccggagatattatcagagtgctggaagggccgatcagcccggtagaagtgcttgaggatgaagagcctgccaagcgggagttatggatccgcatccgcgacgctgtaaaagacgtgctggacagcacgacgttagaagaccttgcgagctacacggacggcgagcaggaagcttatatgttctatatttaaaccagaggtgtaaagacaatggaacggatttatttagatcatgctgcgacttcccccatggatgaacgtgtgctcgaagaaatgaagccccatttcttcggcagtttcggcaacccgtcaagcattcattcattcgggagagaatcccggaaatgggtcgatgaagcgagagcggacatcgcgcgcgaaatcagtgcgaaagaacaggaaattattttcacaagcggcggtacggaggctgataatttagccattttcggaacggctgccgcccggaagaatgaaggaaagcatatcattacgaccgctgttgagcatcatgctgtattgcacgcctgcgaaaagctggaagaagacggctttgaggtgacatacctcatgcccggcccttcaggacggatcagtgcaaatcaggtgaaagaagcgctccgtgatgatacaatccttgttaccgtcatgtatggcaataacgaagtcggaaccattcagccgattgacgaaatcggagagctgttaagcgggcatcaggcctattttcacacagatgccgtccaggcattcggttatatgccgattgatgtgaaaaaaagcagaattgacatgctgtctgtttccggtcacaagcttaacgggcctaaagggacaggctttttatatgtaaatcaagaggtgaagctgtcaccgattcttcttgggggagagcaggaacgaaagcgccgcgcggggacggaaaatgtaccgggcatcgccggcttaaaagaagcggtcgtcctttcaaaccgtgagagggaagagaaaacagcgaagtataaggagtttaagaacatcatcatgagcacgctggaagaagccggcgttacagcggaggtgaacggagatgccgagaaatgcctgcctcatattttaaacctttactttcccggtgtgccggtggaagcgctgctggtcaatcttgacatggaaggcattgccgtctccagcggatctgcttgtacggcgggatccgttcttccgtcccatgtgcttacggccatgttcggaagtgagagcggcaggctgacttcgtcaatccgcctcagcttcggcctcggcaatacggcggaacaaatcgaaacagccgccgaaaagcttgccgccgtcgttaaacggcttgcttaaaacggcggacttatgtttttaatggagtgaatgcaaatggaaaaacggccggaggatacaagagtcgtagtcggcatgtccggcggcgtggactcttccgtggcggcccttctgctgaaggagcagggctacgatgtaatcggaatctttatgaaaaactgggatgatacggacgaaaacggtttttgcacggcgacggaagattatgaagacgtcatccgggtctgcaaccagatcggaattccgtattatgccgtcaattttgagaagcaatattgggaaaaggtatttcaatatttccttgatgaatataaagccggaagaacccccaatccggatgtcatgtgcaataaagaaattaagtttaaggctttcttggatcatgctctgtcactcggcgcggattatcttgcgacgggccattacgcccgcgtggacagaagcgcagatacagtgcgcatgctccgcggtctggatgaaaacaaggaccagacttattttctgaatcagctcaatcaggaacagctcagtaaagtcatgttcccgatcggtgatctgcaaaaaagccgcgtgcgggaaattgccaaagaagcagaacttgcgacagctgcgaaaaaagacagcacgggaatctgctttatcggcgaacgcaacttcaaaacgtttctcagccaatatctccccgctcagccgggcgatatgatgacaatggacggagaaataaaagggcgtcatgacggtctgatgtattatacaatcggacagcgccacggtcttggaatcggcggaagcggcgagccgtggttcgccgtcggtaaagatcttgaaaaaaacattctgtatgttgatcaaggattccataatccgcttctgtattccgataagatcacggcgacaaatgtcagctggacgcgtcccggtctgatggacggcggcgaaatgacatgcacggcgaaattccgctaccgtcaggaagatcacaaagtaacggtgaaaatgacgggtgatgatgaagcggaaatcatttttgacgggcaggtacgcgccgttacgccgggacaagccgtcgttttttatgacggagaagagtgcctcggcggcggaacgatagatgacgtttataaagacggaacaaaactgtggtacgtataacacatgtaaaaaacctcaactcgcatgttggggttttttagcgaaaggaagttaaaaatggattataataaaatcgggattgacgccatgcaggagggcgattttgaaaaagcggcagaggcttttacgaaagcgattgaggaaaacggccaagacccggtgccgtacatcaacttcgcaaatctgctttcttctgtgaacgaactcgaacgggcgcttgcattctataacagagcgcttgaattggacaattcggcggcagccgcttattacggtgcgggaaacgtatatgtgatgaaagaatcgttttccgaagcgaaggatatgtttgaaaaagcgcttcgctccggaatggaaaacggagatttgttttatatgctggggaccgttctcgttaaattagagcggccgaagcttgcactgccgtatctgcagcgtgccgttgaattaaacgaaaatgacacggaagcgcgcttccagttcggaatgtgtcttgcaaatgaagaaatgctggatgaagctcttgcgcagtttgagacggtgatcgagcaggatccaggccacgcggacgcattttataatgccggggtcgcttacgcgtacaaagaaaatcgtgaaaaggcgcttgagatgctggaaggcgcaatcggcatacagcctgatcatatgcttgcgcttcatgcgaaacagcttatcacccagtcataacaaaaggagggaaggctcgtggatcagctgaacatcgaagaacagccgtatgtaaaaggcgtcattcatacggtcatttatcataatgacaccaacctgtatacagtgctgaaagtcaaggttgcagaaacgtctgaggcgatcgaagacaaggtcgtatccgtaacgggctacttccctctgctgcaagaagatgagacctacacattttacggaaaaactgccacgcatcctaagttcggcctgcaatttcaggctgaacactttaaaaaagaaattccgaccacaaaagaaggaatcattcactatttatcaagtgatctgtttgaaggaatcggaaaaaaaacggcggaagaaatcgtcaaaaagcttggagacggcgcgctcaataaaattctggctgatgcgtcggtgctttatgatgtgccgaaaatgtcaaaaaagaaagcggacaaactggcgggagagctgcagcggcatcaggggcttgaacagattatgatctctctgaaccaatacggtttcgggccccagctatccatgaaaatatatcaggcctacgaaacggaaaccttggagaaaattcaggaaaatccttatcagcttgtaaaagacgttgaaggcatcggctttgtgaaagctgacgagctgggcggaaaaatgggtctgtcaggaaaccacccggagcggatcaaagcggcaatcttatatacgattgaatcgacctgtctttcagagggccatacgtacatagagacaaagcagctgattatcaatacgcaaacgctcctgaatcagtcagctgaaggcggccgcgtcacggaaatggatgcggctgacggcatcatcgccctcggggagagtaaggatatcgtcatcgaaggagagcgctgctattttccctccttgttttacgcggaacaaaacgtcgcaaaacgcgtgctcgacattgcggctcagacggagtatgccgatcaatttcctgaatcggaatttctgcttgcactcggtgaactggaagaacggatgaatgttcaatacgcaccaagccaaaaggatgccattcaaaaagcgctgtcttcaccgatgcttttactgaccgggggacctggaacggggaaaacgaccgttattaaaggaatcgtggaattatacagtgaactgcacggcgtatcccttgaccccggtgattataaaaaagacgaggcgtttccggtgctgcttgccgcgccgaccggaagagccgcaaaacggatgagcgaatctacgggtctgccggctgttacgattcacaggctgctcggctggaatggcgctgaaggctttacctacaacgaagatcagccgattgaagggaaactgatcattatagacgaagcgagtatgcttgatatctggctcgccagccatttgtttaaggcgcttcctaagcacattcagctcattgttgtcggtgatgaagaccagcttccttcagtaggaccggggcaggtgctcagagatcttttggcttctgaagtgctgccgaccgtgcgcctgacagatatttaccgtcaggctgaaggatcatccattgtggaacttgcccatgatatgaaaaaaggactgcttccaaaggggctgaccgcgccgacaaaggaccgctcatttatccgctgtaattcttcacagattaaagaagtcgtggatcaggtcgtctcgaatgcgttaaaaaaggggtatacctccagagatattcaagtgcttgccccgatgtacaggggaaaagcgggaattaacgagctgaatatgcttcttcaggacatcatgaatccgcctaaagaaaaaaggcgggagctgaaattcggagatgtcgtctacaggacgggcgataaaatattgcagcttgtcaaccagccggaaaacaatgtgtttaacggcgatatcggcgaaatcgtgtccattttttatgccaaagaaaatacggaaaaagaagacatggtcgtcgtctcgtttgacggcaacgaaatcacctttacgaaaaaggatttcagccagtttacccacgcttactgctgttccattcataagtcgcaggggagcgaattcccgattgtcgtcctgcctgtcgtcaaaggctactatcgaatgctcaggagaaatctgctttataccgccattacaagagcgaaaaaatttctgattctttgcggagaagaagaagcgcttgaatggggcgtcaaaaacaatgatgccaccgtcagacagacgtcgcttaaaaacaggctcacagagcagactgaagagatggatgcagaactggccgccctgcaaaaagagctgccgttcagtgtatatgatgcgaacatcggaatggaaggcatcacgccttttgactttatggaagaaaaagcgtaaataaaacccggcacatgttcatgcgccgggttttcgcctgtggaagtcatttcaaagtatgctgcctggcttcttggcaaaacctatacgtgttcaacaaaaggtggttgatcacactttgagaacatgccatgcagctgaaggacgaacagtatatgacgaaaacaccgggcgcagtctcgggatgatatcggatgtatgtttctctctggacggccggtttctcggtttcgtgctggagcagaaacgcctgtttcacaaccgtcatctttttttaggggcaagtgatataaaagagatggatcaagaagccgtagctgccggtcatgctcatttgcagcctttgccgaagagctgtttcacctttgaacagattaaaatgcagccggtgaaatcgcctgatggtgaaatgttcggtttgctggaagatgtatacttttgtttggacaggggcataatcgtagcatatgaactctcggacggcttcttttcagatctggctggcagacgccaagtgcgccgcgccgccgatatgcttattgaagcggggaaagaaggcatcgtcctgaacggataagaggtgtagtctgtgcttgtatgtccgaactgcaaaagtaaagatatcggcaaaatcggcgtaaaccaatactattgctggggctgcttcattgagctgacggtggccaaaggcaaaattgcgacacatcaagtagaggaagacggcacgttaagcagtcttgatgatttgttttctgaagacgaacgcagtatcaatttttaaagttgaaaggagatacgcgcgatgggcagaacaatgacctctctgttggctttaggggctggagccgttatgtatcgtatggcttctcagtccgatatgctgaataaaaaaggtatgaaacggatgagaagacgagtcatgaaaatgttttaagcggaaaaaaggatacttctccggaagtatcctttttacgtttgtctcgcttccagccgtctggcagcgagagacaggctgtaattgaccgcgaaatacatcagggccgccagcagaaagatcgggaaaaaataccccccgtcagcgctttgtccgtttaaaatctgcgcgttatgaatcagttcgggcagagcgatgacgaccgcaagtgacgtatcctttaataaggagataaactggctcacaatcggaggaaccatacgcctgagcgcctgcggcatgacgacgagaaaaagagtctgcgtgtacgtcagtcctgaagaacgcgccgcttcaatctgtcctttgtcaacggattgcaaaccgcttctgatgatttctgacagcatggccgattcaaaaatcgtcagcgccgtgatggcggccgcggtaatttccagtttgatcccgatttccggaagggcaaaaaacgtaaagaaaatgattaataacagcggcaggttgcggatggtttccacaatggccgctataatgcccgagacgataggaatgttcgcatagcgcaaagtgccggcggcaagcccgaacataaaactcaggacaatggagatcagcgcaacataaagtgtgaccaaaaagccgtcccataaaaacagcagatggtcaggtgtataggcgccgctaaaatccatgttattcactctccttctctaataactttttccgagacgtctttccaaatagtgaaccccgatgctgagcgggatcgttaatatcaaataaaaaagcgcgacgaaaatatagacatcaaacacgacaagagtgctcgaggacacgagatccgcctgatacatcaaatcgagtcccgccaccactccgagtattgatgagtttttgacaaggttgagaaattggtttccgagcgggggaatgacgatttttacggcctgaggaagaatgatatatctcatcgcctgactgtaggtgaagcctgacgatctggccgcttccatctgccctttggggacagtctgaattccggctctgatggcttctgcgataaaggcggacgtgtaaatcgtaagcgcaatcgttcccgcctgaaagccgtccagtctcagcccggcgttcggaagtccgaaataaaaaacgaatgtgatgaggagaagcgggatgttacggataaattccacatacgcagtgccgatccattgaaggggtttgaaagccgtgattctcatgactgcgatcagaacgcccagcgcaaagctgcctgccagcgcgatgaagctcgcaagcaatgtgtgcaggaaaccgtccatatacatatcgaagttttccgttaaaattgaaaagttcatctatgtcactccttataaaacggggatgagcatgcatgctcatcccgcggtccgtcctattttgccggttcttcttttatccattttttatagattttttcgtacctgccgtcggctttcatttttttcaaagaggcgttgatttctttgacaaggccggattggccttttttgacggcgattccgtaaggttcatcggtaaaggtttcgcccgtcagctgatattgtttattttcatcggccatgccgtataaaatcgcattatcggttgtgagcgcatctccctgtcccgctttaagcgcagtgaacgcttcggcgtaattttcaaattccagcactgaggcgtcaggcgctttttctctgatgttctgtgaggaagtggagccttttaccgccaatacttttgagccttttcccaggtcttcggtgcttttgatgctgcttccttttttgacgagcagggattgcccggcttcaaaataaacatctgagaaatcaacttcttttttccgctcatccgttatcgtcatcgtggcggtgatggcgtcgatatcgccgttttgcagcatcggaatcctcgtttttgacgtcacttctttaaattccgctttcttctcatcccccagaatatcttttgcgagctgttttgagatatcaatatcgaagccttcaatatcaccggagcttgggtttttcagcccgaataacctcgtatcggttttgacgccgaagatgattttgtctctgtctttaatagaggctaacgtgtcttttcccgttccttttgaatccccggacgtttctttccctccgcaggctgccagcataaagacggccagcagtgatatcaatccgaatgacaaccattttgttgcgcgtgacataagcgctcctccgtttcttttcagtgatttaaaatacggcttaagaataaacgcgccctctcttcacgggggctttcgtaaaattcagccggtgcagcttcttctaagatggatccgccgtcgataaacacgatgcggtccgccacttcttttgcgaatcccatttcatgtgtgacgactgccatggtcatgccttcctttgcgagtgttttcatgacatccagcacttccccgatcatttccggatcaagcgcggatgtgggttcatcaaacagcataatttcgggcttcatcgcaagccccctggcgatggcgacacgctgctgctggccgccggaaagctgtgaaggataagcgtccgctttgtccggtataccgacttttttcaaatagtataaggccgtttcctttgcttcttcttttgattgcttgagcactttgatcggtgcgagcatgatgttttgcagaacggttttgtgcgggtacagatgaaaatgctgaaacaccatgccgatattccggcggacctgatttatatccgttttcttgtcacggatggagacgccgtttaccgttaaggcgcctccatcaactgtttccagctgattaatgcagcggagaagcgtgctttttcccgatcctgaaggtccgatgataacgacgacttccccttttttaatgtgcagattaatgtttttcagcacgtggaaatgtccgtagtgcttatttacatcctgaaatgaaatcatggccatcctccttaaaaaaacatgagtcatattgactggacagttttgaaatcctttaacacattacgatggttatacagacttttatgaatattatttagattatttcgtaatttctgataattatttccgtcaagaggtctgcgtcataaggcgtagtttatgaaacgggaataattccggctttctgtcaaaagataaagcaagaggtgaaacgtcatgcttcaaaaaccgctgcagctcttaatgtggacagctgtatgtctgctcgttttgttaacagtgtatgtcttttgcatgctcgatatgttatggtctcccatttggcttgttataaaatctctctttattcctatattcatcgcagtatttattgcttatcttttacttccgattactgaatggcttcatagaaaagggatgcctagaactttaagcctgcttctgatttattgcctgtttttcggcggaatcggctggggggtttataaaggggttcctgttttaattgaacagctgcaggatctgtctgagagcattcccggtcttgccgaaaactacaacagcatgctgaggcatctgcataatcacacggatcattggcctgacggcatgcaccatcggatggacaaaatgattcagcagacagaaacgtttcttgccggcacgattgaaagcacgatcagaagcatccgtttcgtgcttgattatatcctgatcgcggcgacgattccttttctcgtgttctatatggtgaaggatataggcgtcatgaaaaagacggtctggtatttgacgccgaagtcctggagaaaaagggggagtgaatttctgcgggatgtggacgactctctcggtgattacatccgcggtcagcttctcgtttgttttttgctcgggttaatagccggcgtttcattttggctcttcgggcttccttacccgctgattttgggccttgccatcgggattacgaatgtcatcccgtatttcggcccgtttatcggcgctgtgccggcgctgctcctttcgctggcgatttcctccaaggctgtgatcatcgtaatcgtcacgatttttattcttcaatttatagaaggaaacattttgagcccgctcattgtcgggcgaagtctcagaatgcaccccgtcgtgatcatgcttgcgcttcttgccggaggagagctcgcgggcattcccggcatgattctcgctgttccggcggcagccgttttaaaagtgacggccattcactttttgcggatcaggacggaacattgacattcgggttctgcttgtctataatttcgagtagaatacatacgaatctcgagtgacggataagagtacgccgaagccctgtttaagagagaagctccgatacgctgagaggagcttcagcagaagatcggccgaagctaatcctgagtgcagttaaaggctgccgcaatcctgcgttacgggatgaaaggtgacaggcctttttcggcctgtaatcagggtggtaccgcgagacagctctcgtccctgtgtgaacgcatggtttgcatagggagagagcttttttgctgtcgcaaaagagaatttcgggtagtgataaggaggaatatagatgaaacacttaacttctgctgaagtacgtcaaatgtttttagatttctttaaagaaaaaggtcatgccgttgaaccgagcgcctcattggttccgcatgaagatccgtctttactgtggatcaacagcggcgttgcgacgctgaaaaagtactttgacggccgcgttgtgccggagaatccgagaattgtaaacgcgcaaaaatcaatccgcacaaatgatattgaaaatgtggggaaaacggcgcgccaccacacgttctttgagatgctcggaaacttttccatcggtgattattttaaagaagaagccatcacgtgggcatgggagtttttaacgagcgaaaagtggatcggctttgatccggagctgctgtctgtaacggttcaccctgaggatgaagaagcttatacgctatgggcggaaaaaatcggcgttccggaagaaagaatcatccgtctggaagggaacttctgggatatcggcgaaggcccgagcggaccgaatacggaaattttctatgaccgcggcgagaaatacggtaatgacccgtcagattctgaattgtatccgggcggcgaaaatgaccgctatcttgaagtatggaacctggtattctcagagttcaaccacaacccggacggcacgtacacaccgcttccgaagaaaaacattgatacgggcatggggcttgaacggatggtctccgtgattcaggatgtcccgacaaactttgacactgatttgtttatgccgattattgaagcaacagagcgcatttccggagatgcttacggaaaggacgcaatgaaggatacggcctttaaagtgatcgccgatcatatcagaacggtcgcatttgcggtaagcgacggagctctgccgtcaaatgaagggcgcgggtatgtactgagacgcctcttgcgcagggcagtgcgatacgcgaaaaccatcggtatcagccgtccgtttatgtacgagctggtaccgactgttgcaggaattatggacgctttctatccggaggtgaaagaaaagcaagagtttatcgccaaagtcatcaaaacggaggaagagcgcttccacgaaacattaaacgaaggtctggccattttatctgacgtgataaagaaagagaaggaaaaaggcagcggcatcatctccggaaaagacgtattcaaactgtacgatacgtacggattcccggttgaattgacggaggaatacgcggaagatgagcaaatgaaggttgaccataaaggctttgaagccgaaatggaaaaacagcgtgaacgggcgagaaatgcgcgccaagatgtaggaagcatgcaggtgcagggcggcgcattgcgcgacattaccgcagaaagcacatttgtcggctacagtgccgtaaaagctgaagcgaaggtgatcgagcttcttcatgacgggcaattaatcagcgaggcgcatgaaggggataccgtccaaattcttcttgacaaaacgcctttctatgctgaaagcggcggacagatcggtgacagaggagtgctgagaagcgagcaggctgtcgtaaccattaaagacgtgaaaaaagctccgaacggccagcatgtacacgaaggcacggtggatagcggcacgattcaaaaaggcgcaagcgtgacggctgaagttgaagatcaaatgagaagcggtgtggtgaaaaaccatacagcaacccaccttctgcaccaggcgctgaaagacgttctcggcacacatgtcaaccaagcgggttcactcgttaccgaaaatcgtctgcgttttgacttctctcatttcggtcaagtgacgaaagaagaacttgaacgcattgaaggaatcgtcaacgaaaaaatctgggagagcattccggtagcgattgatttgaaaccgatcaatgaagcgaaagaaatgggcgcgatggccctgttcggcgagaaatacggcgatatcgtccgcgtcgtacaagtcggagattacagccttgagctttgcggcggatgccatgtcacgaatacggctgaaatcggtctgtttaaaatcgtatccgaatcagggatcggcgcaggtacgcgaagaatcgaagccgtaacaggaaaaggcgcttatcaggaaatgaacagccagctcagccttctgcagcacgctgcggatgagctgaaatcaaacgtaaaagacgtaccgaagcgaattcagtctcttcaagcggagctgaaggaagcgcaaagagaaaatgaatcattgctcagcaaacttggcaatgtggaagccggagccattctgtcaaaagtaaaagacatcggcggcgtaaaagtgctggctgaaaaagtaaatgcgaaagacatgaaccaccttcgtactatggtggatgatctgaaagcgaagctcggttctgcggtcatcattctcggcgccgtgcaaaacgagaaagtcaacctttcagcaggcgtgacgaaagacctgattgaaaaaggccttcacgccggcaaaatggtcaaacaagcggctgaagtctgcggaggcggaggcggaggccgtccggacatggcgcaggccggcggaaagcagcctgaaaaattggaagaggcgctcgcatctgcggaagattggataaaatccgttttataatcctttcaactagtgtagaatgatgataagatgaggacctcaggctgaactttgcctgcgaatttgggaaagaggtgcaaaacggtgagctcgtttgataaaacgatgaaatttaatttctccgatgattctgctgaaacaaacgtcgaagaagtgctgattacggtatatgatgcgcttcaggaaaaggggtacaatcctatcaaccagattgtcggatacttgctgtctggagatcctgcatacattcctaggcatcgcgacgcccggaacttaattcgcaaactggaacgtgacgaattaatcgaggaattggtaaaatcctatctagaacagcataaagaggcgtaaatacattcatgagaatattgggacttgatcttggaacgaaaacactcggcgtagctttaagcgatgaaatgggctggaccgctcagggcattgagacgataaaaataaacgaggctgaaggagattacggtctggaccgtttatccgagctgatgaaagactataatgtagagaagatcgtgctcggttttccgaaaaacatgaacgggacgatcggtccgagaggcgaagccagccaaacatttgcgaaactgcttgaaacagcgtacaatgtccctgttgtgctgtgggacgagcgtctgacgacgatggcggctgaaaaaatgctgatcgcggctgacgtcagcaggcaaaaacgaaaaaaagtcattgataaaatggcggctgtcatgatccttcaaggatatctggacagtttaaactaagaggtgaaagaaatggaacacggcgaaaaacatattacaattgtcgatgatcaaggcaacgaacagctttgcgaagtgctgttcacatttgaaaacgacacattcaacaaatcttacgtactttattatccgattgatgctcaagacgatgatgaaattgaaattcacgcttcaagcttcgaaccgaacgaaaacggtgaagacggcgaactgatgccgattgaaaccgatgaagagtgggaaatgatcgaagaaacgctgaacacgtttttagcggaagaagacgaagaataaaatgaacggaaaaagccggagcgcatatgcgcttcggcttttttttgtaataaattgccgaatgcacatgaatcatgtagtataagagctgttgggaggaaaatacttgtatgaatatcaatcagactaaaaattcatttccgcgtaaaaacaaaaaaacaacgataatactgtcctccgtgatcgctctgcttatcatcatttgcggtgcttttttctatggaaaatctctgctgtccccggttgacaaaggcagcaaaacggcagtcaatattaatattccgagcggttcttccgtttcggcaatcgctgaaattcttgaggatcagcatgtcatcaaaagcaaaaaagcatttcagctgtatgtgaagtataaaggcgcttccgggtttcaggcgggattttaccacctgaataaaggaatggatgcggatgcgattatcaaaaaactgaccgcgggatcaacgggatatgcctttcagatctccgttcctgaaggaaaacagcttacacagattgcggatgcgatcgcaaaagaaacatcatattcaaaagaagagatcatggcaaaactggatgacaaaacattcatcggcaaactgaaaaaacagtttcctgatacaataacggacgcactttcaaacaagaagctcaagcatccgctcgaaggctatctgtatccggccacatatccgtttaatgatccggatgcatcgcttgacacgattttgacggcaatggttcaggaaacaaatacccgtatcgaaacgtataaatctgaactggaaaaaaagaaactttccgtccataacgcgctgacgatggcatcgcttattgaagaagaagccaccgccaaagccgaccgtcacaaaatcgccagcgttttttacaacaggcttgcagaaaaaatgccgctgcagactgacccgacggtattatatgcggccggtaagcataaaagccgggtctactacaaagacctgaaaattgattctccgtttaatacgtataaacataaggggctgccgccgggaccgattgcaaatgccggtgattcatcatgggaagcggctctccgccctgacaaaacggattatctctatttccttgcaaaaccaaacggcgaggtcgttttcaccaaaacattaaaagaccataataaagcgaaggaaaagtatatttccaaaaaagacagcgaataaaaggagggcaaaagctctccttttattccattctgaaaggttttatgataaaatatatcgggttgtttacttatggataaagaagtgtcttaagagagtgtccccgcggattcgtcaggggcactcctttttagaacggaggctgtttgccgtgaatgatcggtatgaacaaataaacgagtatataaacgcgatgctgaagcctcggcctgataaagtgaaaaagcttgaagcctatgcaaaagagcaccatgttccgattatggaagaagcgggcattgaagtgctgcttcaaatgctgtcgattcaacaggcgaaaaacattttggaaatcggcgcggcaatcggatattccgccatacggatggcgcttgagcttccggatgcgaatatttacacgattgaacgggacgacaaacgctatgaagaagctgtgaacaatataaaagactttgaaatggaaaaccgggttcacgtaatgcacggggatgcgctggaactttctgagtctgtccgtgtcacggctccttatgatgccatttttatcgacgcggccaaaggccagtacacgaacttttttgagctctatgaaccgatgcttgcgccggatggagtcatttttacagacaatgttctgtttaaaggactggtggcacaaaatcactcggacattgagccgaaaagaagacggaagcttgttgaaaaaattgatcaatataaccaatggctgatgaaccggcctgactatcaaacggtcatactgccggtcggagacggcatcgccatcagtaaaaagaagaggtgaatgatcatgaaaaaacctgaacttttggtgactccgacttctgtacaggatattcttccgctcattcaagcgggcgcaacggccctgttagtcggagaacagagatacggcctgagactggccggtgaattttcaagagaagatataaaagaagccgtaaagacagctcatcaggaaggcgcgaaagtgtacgccgccgtcaatgctatttttcacaacgaaaaagtggacgagctgaacggctatcttgcctttttgcaggaggccggcgttgatgcggctgttttcggtgatccggccgttttaatggcggcgcgtgaagcggctcccgatcttaaactgcactggagcacggaaacaacgggtaccaactactattcctgcaattactggggacgcaaaggcgcacggcgggcagtgctggctaaggaattaaatatggacagcatcattgacataaaagaaaacgccgaagttgaaattgaaattcaaatccacggcatgacgtgcatgttccaatcaaagcgttctttagtgggccattacttcgaataccagggaaaagtcatggacatcgaacagaagaaaaaagaagcgggaatgtttctgcatgacaaggaacggggcaataaatacccgatttttgaagatgaaaacggcacgcacatcatgagcccgaacgatgtgtgcatgattgatgaattagaggacctgatggacgccggcatcgattctttcaaaatcgacggagttttgaagtctcctgaatacttaactgaagtgacccgcatgtacagagaagcaatcgatctgtgcttcgaaagccgagagacatacgaagagaaaaaagagagctggatagagcggattgaaagcattcagcctgtgaacagaagcatcgacacaggattcttctttaaagaaacggtctattaaaaaggagggtgcaacggatgacagccgtaaatcaaaccatttccaaagtcgtaaacggaaaacgcgtcattacgaaaaaacctgaactccttgctccggcaggaaaccttgaaaaattaaaaattgccgttcattacggagcggacgcggtttttatcggaggacaggaatacggactccgctcaaatgcggataacttctcaatagaagaaattgcagagggcgtagaatttgccaaaaaatacggggcaaaaatatatgtgacaacaaacattttcgcccataatgaaaatatggacggtctggaagaatacttaaaagcgttgggagacgcaaaagttgccggaattatcgtcgctgatccgctgattattgaaacatgccggagagtggccccggacgtagaaattcacctcagcacacagcagtccctttccaactggaaagcggtgcagttctggaaagaagaagggcttgaccgcgtggtgcttgcccgtgaaacgagcggactggaaattaaagaaatgaaggaaaaggtggacattgaaatcgaaacctttatccacggcgccatgtgtatcgcttattcaggacgatgcgtgctgagcaatcacatgacagcccgggattccaaccgcggcggctgctgtcagtcctgccgctgggattatgacctgtatcagacagacggtgcaaacgcggtcgcgctttatgacgaagaagacgctccgtttgcgatgagcccgaaagatttaaaattgattgaatccattccgcaaatgattgagatgggtatcgacagcctgaaaattgaaggccggatgaaatcgattcattacgttgcgacggttgtcagcgtgtatcgcaaagtcatcgacgcatactgcgctgatcctgaaaactttgtcattcaaaaagaatggctggatgagctggacaaatgtgcaaaccgggataccgcgcctgctttctttgaaggcacgcccgggtatgaagagcagatgttcggcgaacacggaaagaaaacaacatttgattttgccggtctcgtgctcgcgtatgacgaggaaactcaaatggtgacgctccagcagcgcaatttctttaaacaaggtgacgaagtggaatttttcggtcctgaaatcgacaatttcacattcacaatcggcactatttgggacgaagacggaaacgagcttgatgctgcccgccatcccctgcaaatcgttagatttaaagtagacaaaaagatttatccgagcaacatgatgagaaaggggaagtaatcaccaatgggtaagagtcctgtagttataggcatcgcaggaggttccggatcaggaaaaacaagcgtcacccgttccatctatgaacagtttaaaggacactcgattttaatgatccagcaagacctttattataaagaccaaagccatcttccgtttgaagaaaggctgaacacaaactatgatcacccgctcgcatttgataatgactatttaatcgagcatattcaagagcttttgaattaccggccgatagaaaagccgatttatgattataaactgcatacgcgttctgaggaaaccattccggttgagccgaaggatgtcattattctggaaggcattctcgttctcgaagataaaagacttcgcgacctcatggatatgaaactttatgtcgacacggacgcggatctccgtatcatcagacggattatgagagatattaacgaaagaggccgttcaatcgattctgtcattgagcagtatgtgtccgtcgtcagaccgatgcacaatcagtttgttgaaccgacgaaacgctacgcggacatcattattccggaaggcggacaaaaccacgtcgcaattgatctgatggtcacgaagattcaaacgatccttgaacaaaatgcaattttgtaataccatagcatagacataaataactcagaccatattatgtataggctggaagggaatgagacagttcccttctttccctgtttataaaccgaaacatttgcagaaaacacacattcagtttaagataaacagtacctatatgggagagaagaacgaggactgccctgtgttctcattcttgattttttcgtttatgctctcatacataatcacacgttattgttgagggacaaccaccaaggagtgaaggaacatggcacaagaaaaagtttttccgatgactcacgaaggaaaacaaaaacttgaacaagaattagagcaattgaaaacggttaaacgtaaagaagtagtagagcgcattaaaatcgcaagaagcttcggagatctgtcagagaactctgagtatgattccgcaaaagaagaacaggcatttgtggaagggcgcatcacgacgcttgaaaacatgatccgcaatgcgaaaatcatcgaggacgacggcggttcaaatgtagtcggtttgggaaaaaccgtatcattcatcgaattgcccgacggtgaagaagaatcttacacgattgtcggaagcgctgaagctgatccgtttgaaggaaaaatctcaaacgactcgccaatcgcaaaaagcctgctcggcagaaaagtggacgaagaagtgacagttcagacgccgggcggagaaatgctcgtgaaaattgtgaaaatttcataagatccgtttaacaatgaaacacctcgtccaaaatgtggatgaggtgttttttatgatcgtatcaaaaaggctgaaaacggccgtgatttgttttctgctcgtgtttttctttctgcttgcaaggctggctgaaattcagctgttttttacagaatctttttcaaaatccaatattaatctgattcaggaaagcgtcaagcagcggacggaagaagtccttatttcagacggccgcggctcttttcttgatcggaacggcaaagaactgaccggaaaaaagcagcctgccgtcatactgtttccctttctcgtgacgcaggattggccggttgaccgggtatcagacattctcggaatgaaacagggggagctcaggcagctgctgacggaagcaaaaaaaccggtgatcctgaacagcagaaaaataaaacatttgacgaaacaatccgtggcaaatatcaattctttgaaatatcccggcatttacggcgtatatatgaaagacagcaaagaaacaaacatagccgctcatctgttgggcgcgacaaaccaggaccctgagcttttgaaaaagaaataccccggcaggaaggaactgccgatcacggcaaaaatcgggacaagcgggatggagcggacatttgatgagtttttactggcggatcaggacacaaaacttttgtatcatgtcgacggaaggggaaaccctttattcggaatggacgtcaaatatacggctgaagcaaacgcgttttatccgctgcaagtcaaaacctccatcgaccgcaatattcaaaaagcaatggaagatgtattgaaagaccgcgggttaaaaaaggggggagccgtccttttagacattgaaaaaagcagtgtgctcggaatggtatcaaagcctgacgccgacatgtcaaagcagcagacactgcaaaattacatgctgacgccgatttatccgggatcagtgtttaaaacggtgatcgccgcagccgcaatagaacaaaacgaagtgaagccgggcacatcctttaactgcaatctcaacctgtacggagagccgggggatgataaaggcacgctcagttttggagaaagctttgcccaaagctgcaattatacgtttacaagtcttgcggaaaaattaatcaaaaaagatgattccgttattgaaaacatggcggagaaactaggtctcacacagcgggcgggctgggaaggcaagctgtaccgggaagacggattcagacagctgtataatgaaaaaagcggggtcatttggggagatgacaaagacaaaaccgtaaaaaaagccgtcgcacagacggcgatcgggcaaaaaaacgtgaaagtcacgcctcttgaagtcgccaatatgatggcggcgatcgcgcgcggcggtgagaaaaaacaagtcaaaatcgcggacaaaattgaatacaaaaacaaaacgacgatggcgtcattcaaagaacagccgttaaaaggggaaaacatcgacaaatatacggcgcagcagcttcaaaaaattctcagagaagtcgtcacctcaccgaaaggaaccggccgaaggtttcaggatctgccgtatgagatagcaggcaaatcgggaactgcccagacgggaatgttcacaaaagaaaaacagacgctttaccacaaatggtttgcgggatactttcccgcggacaagccgaaatacgctctcgtggtgctgcacatggacacgccgggggataaggctctgacaaatacagtgttttatgatattgttaaaaaggtacatgaaaatgaaacaaatcagacatagaacaaccgctcagcccatgttaaaatatatgctgagcaagagggataaaggagtgcagaatgattgagcaataaacaatctcgttttgaaaaccgtgataagcgcagaaaagcaaatatggtgcttaacattttaattgctatcgtatctattcttattgtcgtcgttgcagtcagcctcttcatcaacagtccgtcgagcgacgtgagcgaaaaagcggacacgagccagaagcaggaaacacctgcatcaggcaagacgaagcagacatccgatgaagacataaaagacagcaaaaaagatacggcatcagacgatgacaaaaaagataaacaggataaggacacatctgattcatcttcagactctgacagcaaaaaagacgatgattcatcgaaaagtgatgacagcagcaaaaaagactctgattcaagcgatccttttaaaggcgcaaaaataacagagggcggctcatcaagcgatgttgagaaaacaattgttaacccaaaatggaaagcggtcggaacaaagcagacgggagaacatgcggcgacgtatgactcaagctctgaagactggtccgaaatgcttgacgccatctcttacgcaacaggcgtgtcaaaagatcacatgacagtgctgtggctcggaaacaatggaagcccgcaagatgcgaagggtaaagttttagacaaaacgaacggcaaaaagtatcaggtcaccatcacttggaaagacaaaaaaggctggaagccgacaaaagtagaaacgttaaaataaccgcaaaaaagcagctgattattcagctgcttttttctgtcatacgtcagctgaaaaatgcaccgacgcgctgtaaaggattctgccgtcaacggccgtcacctgatgggatacagaacggacgcgaagcataatcgcctggttgttttcaatctgaacgtttattttcttttcaagctcctgcaaagatgccgcttcgaaaaattctactttatctttgattaaatccaattgaaaattcatcagtacagatcctcctgatttttcttctgagtcaatgaaagtataagcctttctgccgtaattgcgcaataatcccaaagtattttagtacccttccattcttttttgtgataggataggaactgttccacgattaatccatactatactcataggaattataaattatggagagtgaaaaatatgggccgtgaatttattccattatttgaagattgggcagcgacttatgatgccacagtgcacggggcagacaaacaatacgctgatgtttttaaagggtatgacaatattcttgacagcatcgtcgcactttcgggttctaacgttttagagttcggaccgggcacagggaatttaacggcgaaattagccgccgcgaacaaaaaggtgtttggtgtagaaccgtctccgtcaatgagaaaactggcggctgacaagctttctgacaaagccgtgttcagtgacggagattttctggagtttcccgctccgccttttcaaatagataccatcgtcagctcgtacgcctttcatcatttaaccgatgaagaaaagcaagcggctgtaaagcaatatggcacaatccttcagaagcatgataaaatagtgtttgccgataccgtctttaaagatcatgaagcttatgatgaaacaattaaaaaagcaatccgaaacggctatcatcaattagcggacgatttaaagacggaacattatccgacactcgggacaatgaaaaacatcttttcagaagagggatttgccgcgcggtttacgcagcaaaatgactttgtctggataatggaggcgattaaacggtaaatcgaagggattgtgtataaatgaaactggcagtcatcggagcaatggaagaggaagttacgattttaagaagcaaactgaaagacgcaaaacaagagatgatcgctcactgtgagtttacgacgggcagctatgaaggcgtcgaagttatcttgctgaaatcggggatcggaaaagtcaacgccgcgatcagcacgacgcttctgcttgaccgtttcaaacctgattatgtgattaacacaggctcagcgggcggttttcatcatacattgaatgtaggcgacgtcgtcatctcaacagatgtccgccatcatgacgtggatgtgacggcgtttgactatgaatacggacaggtgccgggtcttccggcagcatacaaagctgatgaaaagctgatcagtattactgaggaagcggtttctgaactgaacggcattcaagtcgccaaaggcacaatcgctacgggagattcttttatgaatgatccgaagcgggttgaagacgtacgcgccaaatttgcggatttgtacgcggttgaaatggaagctgcggctgtcgcacaggtgtgccaccagttcaaaacgccttttgttgtcatcagagctttatctgatattgccggaaaagaatctgacgtttcatttgataaatttttagaacaggctgccgttcattcaactgagcttgtcctgaatgtcatcaaacgaattcactaagcgggggattctcgttctcctccgcttttccaggaggaggacatatattgaacgtgataacagatattacagaactgatcggaaatacaccgctgctccgtctcaagcattttgatataccggagggaacagcggtttatgctaaacttgagatgatgaatccgggcggaagcattaaagacaggctgggcggaatgctcattgaagatgcgctacgcacgggaaaggtgaaaccgggcggtgttatcatcgaagcgactgccggaaacaccgggatcggactcgctctgtgcgccagaaagcatcagcttcgcgccgttttttgcgtcccggagcatttcagcagagaaaagcagcaaattatgaaagctctcggagcggacatcgtgcatacgccgagagaagaaggtatgcagggagccattcgaaaagcgcttgaactggagagagagattaataattcttatgccgttctgcaatttaaaaaccgagtaaatccattgacttactataaaacgatcggacctgaaatatggaacgcgctcggcggggatatccacacctttgtcgcaggagcgggttccggcggcacctttgccggtacggcagcttatttaaaggagaaaaatcctgccgtcaaaacggtgatcgttgaaccggaaggctcgatcctgaacggaggagagccgcatgcccataaaacggaaggcatcggcatggagtttatccctgattatatggacgagaaccattttgacgccatttacacagtggaagacgatacggcgttttcgcttgtcagagaagcggccgagaaagaaggcctcttaatcggaagctcttcaggggcggctctttatgcagcgcttgaagaagcgaaaaaagcgcccgccggatcaaatatcgtcactattttccctgacggcagcgatcgatatataagcaaaaacatttttcaaggaggtcagtaagatgaagaaaaaaacgctgatggtgcacggaggaattacgggagatgaaaaaacaggagcggtttccgtaccgatttatcaagtaagcacgtaccggcagccgaaagcgggcgagcatacgggttatgaatattcaagaacggccaatccgacgcggacggcgcttgaaagcttaattgcggagcttgaaggcggcgcggcgggatatgcgttcggctcaggcatggctgcgattactgccgtcatgatgctgtttgacagcggcgatcatgttattttgacggatgatgtatacggcggcacttaccgggtgatgacaggtgtgctgaaccgcttcggtattgaagcggactttgttgatacgagcagtgaagaaaaagtcaaaaaggccattcgcccgaatacgaaagccatttatatcgaaacaccgacaaacccgctattgaaagtgactgacctcaaactgatgtctgacatcgcaaaagaagcgggcgtattgcttatcgtcgataatacattttacacgccgtatttccagcagccgctcagctttggcgcggacatcgtgctgcacagcgcgacaaaatatctcggcggccacagcgatgtcgtcggcggcttagttgtgacggctgataaagagctcggtgaaaagcttcattacgtgcaaaactcaacgggcggcgttttaggaccgcaggattcatggcttttaatgagaggcattaaaacactgggactcagaatggatgccatcaatcacagcgccgggaaaatcgccgagctgcttgaagcgcatgatgccgttcagacgctctactatccgggatcagcgaaacatccgggccatgagctgacaaaagcgcaaagctccggtttcggcggaatgatttcctttgatatcggcagcagtgaacgcgtcgacgcgtttttagaaaaattgaacctgtttacaatcgctgaaagcttaggagcggttgaaagcttaatctccgtgccgtccagaatgacgcacgcttcgattccgcgcgaccgccggcttgcgcttggcattaccgacgggcttgtacggatctcagtcggtattgaggatactgaggatttaacggcggatgtgaaacaggcgcttgattcccttttataaagaatggatagatttacattctctgtcggctgtcagcttgtattataatgttggtagactataaaactggcaggtgaccttatatggagaagaaaagactgaaatcattaatagaagattttaagcattacgcatttattctgcttgcagtcagcaccttcatttatatcggcgcggttcttcccggacaagggctgactgcgggccagaaaatgctgatgtttgtaacggattgtgcatttttagcgggcgcttatttctgcgttgaccgttcacttatttataaaaagaggctggaagaggccgaagaataaaaaaagccattgtcttttgacaatggctttttcatttcttattcagaaggggtttcgcgtaattcttttcccattccttttaaaaactgcagcccgaagccgagcgcgcggttaatatcaggatcaccgacggctttcatcagttcaaacatactgactttcctgtcctcttttaaaaatctttgcgcctggtccgtcccggccatggcgctttctaaaagtctgcccataaattcgggatcagcttttgacagcgcgcctcccgcggccatcatcgtattcaggagattggtgacaggttcccgggaaatctgtccgagtgcgattttggcaatctcctcttttgcctggagcatatagccggcggcatcaaaaatgcccaagccattcagctctgccataatggacatcgttttcgcgacggcttcttcattttctgcgagaagcgtcttcagttcttccagtttttcagctttcagctgttcctctgttttcgtttctttttgaatttcagtaattgggcttgccattatgtttcctcctttccttaatcagttaggtgcacatagcccggacggttccattttcgctgagcttccacaccgttttgcggatgacgttttttgttccgcggattcgttttcggaagcggcggtgtatcacaggaaccgagcacttccatgcggacttttgtctgtttataggcaggtgtatgtgtccgtgaatcatacgcaggcccggtcaggaaattaatcgcagaatctttatctgtagagttcatcggcagataaagctcatttgcgcggacacggtctgtcacaagcgcattcaatttaaccgccccaaaaggagagacgagccggatcattgttccgtcgcaaattccgcgttcagccgcgagctccggcgatacttcaacaaatacatccggaactttagactgaatgccttttgacttgtttgtcatgtttccttcgtggaaatgttcaagcatccgtccgttgttaatatgcaggtcatattcttcagggaatacggcaggctccacccaatcgctcagcgcaaaacgggcttttttgtccgggaagttaaagccgtcttcataaagaagcggagtgctctctcccgtaaagcttccccacaggaagctgttccagccgctaagaacgtcgtagcttgcttttccgaacagcggagaaaggctcgccatttctgagaaaatgtcgcttggatgcgtgtaattccaatcagcgcctaaacgattggcaacctcctgaataatccaccagtcgggtttggcatcgccgagtgtcggaagcgcctgatacaatctttgtacacgacgctctgtgtttgtaaatgttccgtctttttcaagagatggaaccgcaggcaggatgacatccgcgtattgcgccgttcttgaaaggaaaatatcctgtacaacaaagaaatcaaggctggataaaatgtcatgaacatggttggcgtttgaatcgacgagcgccatatcttcaccgacgagatacatggctttcatgtttccttcttcaatcgcatggagcatttcaatattatcaagacccggcttgccgtcaatttcaacaccgtaagctttttcgaatttagcgcgtgccgcatcatcggtaatatgctgataccccggaagccagcctggaagagttcccatatcgcaagcgccttgaacgttgttatgtccccgcagcggataagctccggcgcccggacggcggtagtttcctgtggcaagcagcaggttggaaatcgccgctgatgtatcagagccgcctgtattctgggtaacgcccatgccccaaagaacacaagtgccgtctgcatcacgaatcatttcggcaatgcggatgatcgtatcctgagaaagtccggtgatgcgctccgcatattctaatgtatactttttcagcgtttctttataatcttcaaagtagttgacattctcatcaataaacgcttgatcgtgccagccttggtcaatcatatattttgtcactgccatgagccagacttggtcagtcccttgtttcgggctgataaagaggtcggaccgttcagccatttcatttctgcgcagatcggcaacaattaatttttgtccgtgcagcttatgtgcacgtttcacgcgtgtggccagaaccggatgtccttctgccggattggcgccgacgatgagcacgaggcccgcttttgcgatatctttaattgtgccggcgtcaccgcccataccgactgtgcggaataagccgtccgttgccggtgactggcagtagcgtgaacagttatccacgttgttggtttcaaatacttgacgcgctaatttttgaataacgtagttgtcttcattcgtaattttagaagaagaaataaaaccgacagaaccatttccgtgttcggccttgatcgaaccgagtcttgaagcgacaagatcaagagcttcttcccatgacgattcaacaaatgcgccgtttttccggataagcggttttgtaatccgttcttccgaatttacgaagtcccagccgaatttccctttcacacaagtggaaatcgcattaaccggagcatcggaaacaggctgaattttaaggatgtcacggccttttgtccatacttcaaaagagcatccgacgccgcagaacgtgcagactgtttttgtttttttcgtccgtttatcgcgcatagccgcttccacttctgacacggcgaagatgcttgtatagtcgggttcaacatttttcactaaatcaatcatcggttccatgacatcttcttttattcctgtcataaatccggcttggccgagcattgatttttccatcagtgcgttacaagggcagacagtgacacattggccgcagctgacgcaggatgattcattaatggggacgccttcatcccaaatgacccgcgggcggtcgcgctcccaatcaattgaaagggtctcattcacctgaaggttttgacacacttccacacattggccgcaggcaatgcattggttcggatcatagcggtaaaacgggtgagacatatcaaccgcgcactttgaatcatctttcggcgtatacggatatttctgatgctcaattcccatcatttccgctgtattatgcagtgtgcagttgccgttgttgttatcgcataccgtacagtaaagcaggtgattctcgagcaggcggtccatggcctctgtctgagcctcttttacccttcccgacgtaagcgagatggacatcccgttttctgcagccgtggaacaagagcgctgcaatttcccgtttacttcaacaatacaggtgtcacatgtttgaatcggatctacttccggtacatggcatatttgcggaatctcaattccgttttggtttaaaatatctaaaatcttagacccctctggtgcttcatactccgtgccgtcaattttgacacggatagactgaacgtctgtcacttccaattcccctccatcttttaaactcgaaaaaaagccatgcacatagataccggcctcctgtccggagaacggtataaatacgcatggcggaatagttcactagcaagtcttactaacagaccaatcctatttgtataaaacgatagactcataacacgtttcctattacaaatccatcttcactgcttttattataaggtgatatttattataatacaatacgaaaggaaaactttaaccaggtgaaatgtcacaaaggggaaccgggaatgtctttcataggctaaaatcggaggggacaatatgtctaaaaaaattcatgaatttaacgatattatccggaaattgcgcaaagaattatttggaaaggggccggaacgaattcacaccgtttttgtggataacatggcggtatcaacgctttacggcaatctaagcgcaagtgagcagtttatcgcacgcacgcctgaaggaagagaaatggttcatgcggcgcggaccagcttaattcaggaactgtattcaaaacaaacgcctgacggaatggaagagctcatcggagcaaagctcgtgcatctgttttcagacatcaagatcgaagagaatattgcggtgtctgtatttgtctttgaccgaacaattgaagagcgccgtgaagaaatcaaaagctgaaaaaaattcaattgacacgaaattgtcacatttgatatgatatgaactgcctgcagtggcttaaggacgaattttatggaatgtgtgcatgatctgtacattttctatagctgatattttcattctgcttgatattgttgtatgggtatgcatacaagttaggcagcattcaaacccgttttagacgggctgtttgaatgctgccttttttgttaggcgtctttggaaactgcggggctgaaatgataaatggaggggttattatggcttttcgtaaaccggacgaaatagcggagcttgcggtcgaatcaggggtaaaaaaggtgcattcaccgctttcagcactgattgtattaggatttttgggaggagcgtttatcgcactcggttatttgcttgatatccgtgtcatcggcgaccttccgaaagaatggggaagcttgtcgagtttaatcggggcgtccgtgtttcccatcggattggtgctcgtcgttcttgccggcgcggagctgattacgggtaatatgatgtcggtatctatggcgcttttttccagaagaatatccgccggtgcattagtgaaaaattgggtgatcgtgacgttgatgaatcttgtcggcgcactgtttgtcgcttactttttcggacatgttgtcggattaaccgaaacaggaccttacttggaaaaaacgattgcggtcgcacaaggcaaattggatatgccgtttggaaaagttattgtttcggcgatcggctgtaactggcttgtctgtttggccgtctggctttctttcggcgcagaagacggagccggaaaaatcgcgggtatatggtttccgattatggcgtttgtcgcgattggttttcagcacgttgtagccaatatgtttatcatcccggctgcgatttttgcaggttctttttcgtggggtgatctgattggcaatctcattccggcctttatcgggaatgtaatcggcggggcagtgtttgtcggccttatttattttattgcatattcaaaaaaagatcagaaaaagcaagggatgaaaagagtttcctgaggtaagaaagatgccggaaaacaaggacaattgaagcggaatgccagcacattttccgtccaaatcttgaaaaaaatgtttacaaaatggaagctgatggatatacttacaaagtaagaaaaaagcaaagggaggttgaatcacatgacgactttaaacggcaatcaaaatttacaattgaaccgattcagcctgtggaagagttcgtgtccttccttaacctctgcccgtcaagcacgttaatttcggagtatcaggacattcgcagctccccgcagggaaagaagcacgtcttcttttgtctgcggatttagtctgcccgcagcgcatatgaagtttgctgcgggttattttcgcttgtgcggatattgaaagggggtgagcgataatgaccattaatcttttctttttaacactgaccatttcaaagcgttttaaaagtgcggaagagtatgaacgagaacagcaggtcgaagagttttataatgaagcgaaagaacgccagctgaaacacttttatatgaactgaacggacacgaagggccaaaacggaggagaaggaggagatcatcatgttcagaattgaactgctgaatcattacacaatggagaaggaccaggtttagcgaggatgttgctgtcacgtcgcagacggcctgcataccatggtaaagaaagaaaaattggtaagcgggtgatagcatgcaaggcggtcagaacagaattccatccatcgggcacgggtatgcgtcaatgccccattcatttaaacacggctacggcaacccgtatcgccggcagagaatggcggcgctttcccggcagacaagatatatagcaccgtattattggtactagagcaggcggaaaacctacgttttccgtcttttttttatgaaaacaaatataaatttcaaataaatcgaaacgttcatgaagagaagtgcgtctagttagtacctcatactaatacgaggtaatattatttctgaataataaatcacaggaatggaaaagcgggtgttatacaatgttgcaacatacatcttcagcattaaaacgaatgcgcgcgaaatactttgctgcatcagaactggcagagtcagtcattcagcaaatcttgatggacatacaggaatacgaccgcattttggaaatcgggaccggaaacggctcaatgtttaaacaaatcatcggacagcttgaaaagggcagtcttaaaagcatagaaacatcgaaacgtaaaatacggaaaacacagcgcgcaaaccgttcggttataaaagccgggcgcggaaacattcagcaggggaggcctgaaagcttaccgttccgcgatcgcagctttcataaagttttctcattacatactgctgaaacagtcagcgattacaggacagcatgtaaagaagtgtaccgcgttcttcaaattgacgggtgtttctatatggttttgaaaccttcgcggatgagtgagaaggatgtgattgaggtgctctatgatcagcatttcagagacatttcagttgtcagcagagattcattccattttattactgccattaaatagaatatttcttgggaaataaaaagagctgcttaagtcactgcagctctttttgtgaaattgggcatatttccttatttttggttatttcacatctattttatattaaaaaaagtttttttcttatacaatggtaatcagatgaccgtacattttaaatgttttgaacaaacggaatgaatattcattccgcatctggaaagggggatgaaatgacagcttcaaacaaggttgaactcattatgaaagcgtcgcttactttgtttacagatagaggatttgacgcaacgacgattccgatgattgccgctcaggccgatgtcggaaccggcacaatctaccgttactttgacagtaaagagacacttgtgaacgtactgtatcaggaaagtgcgcagcgttttatgaaaaaagtcaaaacggactttcagggtatctctgtaagagaagggtttcatcacctgttttattgtctgattgattttacgaaggaaagtgagtatgcattgttttttcttgaaacgaataaggacgcctactttctgaatgaaacgagccgtaagcttcttgatgaaataacacagatgcttgacgtcttttttcagcgcggcaagtctgaaggtgtgctccgcaatctgccgtccaatgtgctgatggcgctgctgctcggggcatatctcaaactctatcagcttatccggacgggaagcgtcgaaataacaaaaccgtttctgaaagaattggaacaatgttcttgggatgccatcagaactcattaactattcgccgaaggaaggaagatcgatatgaaacagctaagcgctataccgcagccgaaaacatacggacctctgaaaaatctccctcacttggaaaaagaaaaactgtcacaatcgctctggaaaattgccgaagaatacggcccgatctttcgtttcgaatttccgagctctgtcggggtcttcgtctcaggccgcgagctcgcggcagaagtctgtgatgaaaagcgatttgataaaaacctcagcaaagccttgctgaaagtccgtgagtttggcggtgacggactatttacgagctggactcacgaaaagaattggcagaaagcgcatcggattttattgccgagcttcagccagaaggcgatgaaaggctatcattcaatgatgcttgatattgccatgcagcttgtgcagaagtggagcagattaaatccgaatgaagaaattgacgttgccgaagatatgacgcgcctgacgctggatacaatcggcctgtgcggatttcattaccgctttaacagcttttaccgcgacacacagcatccttttatcacaagtatgcttcgcgcgctgcaggaggcaatgcgccaatcacagagacacagcctgcaggacaagctgatgatcaaaacgagacatcagttccagcaggatattgaagtgatgaatgaactcgtagaccggatcatcgctgagcggagggaaaatccggatgagaatctgtctgatcttttagcattgatgcttgaagcgaaagatcctgtaacgggtgaaaggctggatgatgaaaatatccgctatcaaatcattacctttttgatcgcggggcatgaaaccacaagcggactgctttcattcgcgatttactgcctgctgaaaaataaagataaattgaaaaaagccgttcaggaagccgagcgggtgctgacgggagagacacctgaatataagcagattcagcagctgacatatacccgcatggtgttgaacgagactttacggctgtatccgactgccccggcattttccctgtacgcgaaagaagatacggttctcggcgggaaatatccgattgcgaaaggacagccggtgacgattctgactccgcagcttcaccgggataaaagcgcgtggggagaagatgccgagctattccgtccggaaaggttcagcgatcccgcggcaattccggctgatgcgtataagccgttcggaaacggacagcgcgcatgcatcgggatgcagtttgccctgcaggaagcgacaatggtgctcggccttgtccttaaacactttgaactgattgatcatactgattatgagcttacgattaaagaagctttaaccattaagcccggtgattttaaaatccgtgtaaaaaacaaggacgtgtccaatcatcagcccgtacaaaaccataaagctgaaggcggcggtcacaaagaagaaacgaaagaaatcccgtcccacggaacgccgcttctcattctttacggatcaaatttaggaactgcggaaggaatcgcggaagagctggctgacatcggcagaagcaaaggattttcaactgaaaccggcccgctcgatgattatgccgggaaactgcctgtaaaaggcgcagtcgttattgtgacggcttcttataacggggcgccgcctgataatgcggcgggttttgtgaaatggatggaaacccttgaagatcaggaattaaagggtgtttcttacgccgtcttcggctgcggagaccgtaactgggccgccacttaccagagggtaccccgcctgatagacaaagtgcttgaagaaaaaggggcaaaacggctgacttctatcggggagggcgacaatgccgatgattttgagtacagtcaggaagcctgggaagactcattctggaaggacatcatgaaggcttttcatatagaggccgctccaaaacaggcaaacaaatcacagttatcaatcgaatacgtaagtgaagcagccgagacgccgattgccaaaacgtacaaagcatttgaggcggaagtcatcacaaacaaagagcttcataccgaaagcagcaagcgttcagtccggcatattgagctgcgtctcccgaagaccgaaacgtatcgggaaggagaccatctcggggtgcttccgcaaaacagcggggaactgatcagccgtgtcattcgccgattcggtctcgacccaaatcagcactttaagatcaagggccggcagctgcctcatctgccgatggaccggccggttaatgcgccggagcttttggcgtcatatgtagagctgcaggaaccggcaacgagagcccagcttcgcgaacttgccgcccataccgtgtgcccgccgcaccaaaaagaattggagcatctttattctgacgatgcggcatataaagaaaacgtgctgaaaaaacgaatgaccatgctggacctgctggaagattatccggcgtgtgaactgccgtttgagcgctttttagaacttctgccgtccttaaaggcgcgctattattcaatctcaagctcaccgaaggcaaacaaaagggagctcagtatcacggtcggcgttgtgacggctccggcgtggagcggccggggagaatacaagggcgtggcttcgaactatttagccggattacaaaatggcgattctgccgtctgtttcatccgctcgccgcagtcgggtttcgcattgcccgaaattacgaaaacgcctctcattatgatcggagcaggcaccggaattgcaccgttcaggggatttatccaggcgcgggctgcagaaaaaatgtccggtaacagcctgggcgaagctcatttatacttcggctgcagacaccctgaagaagacgatctgtacaaagatgaattcgaccatgcggagaaaaacggccttgtcaccgtgcatcgggcgtattccagattagatcaggactgtaaagtttacgtacaggatgtcctgcttcgcgaggctgcacagattattgcgcttcttgaccaaggcggccatctctatatatgcggagacggaagcaaaatggctccggctgtcgaaaatgtactgcttcaggcgtatgaaaaggtgcataacactgattcaaaagtttcctcgaattggcttgaacagctgcaggcggaaggaagatatgcgaaagatgtttgggcaggtgtgtaacagaagcgtaaggcaattgaagattgtgttttaattgaagaaagccggcacgatatttgaaatctactgaatcaaaaggaatagttatagggagtatcgtgccggccttatctttagtatcggacaaaagacacaaatctttaatgtttttattgatttacatgcaggcggctatgtcccttttttctgaattccgccagaaataaaaccggataagacagcaatagcaaaaccgaaataaatgaaatgataccgatccaatgaaaatgcgtccaaaagaaaccgccgcaagacccggccgcgcttgacccgatatagtatgcaagcagatataatgaagaagcttgcgcgcgctgatcaccggctgctcggccgacccaggcgcttgcaattgaatgtgcgccgaaaaagccgaaggtaaacacggcaatgcccgcaattttaagggcaagctggggcaaaagtgtcaccgctgcgccggcaagcataacaaaaatcgcaatcttaatcatttttgcacttccgaaaagatctgcttttttccccatatagacagagctgaacgttcccgcgagatagacaataaaaataaaaccgattacagtctgtgacaaatgataaggagccgccattaaatgaaagccgatataattatataatgtcacaaaactccccattaatataaatcccagagatattaacaaaagcagccgtttgcggtgtagaaccgctccgtattccttacatgccgcttttacgcccgcatgccgctgagatgaatggcgcggagccggaagaaaacgccaaaacaaatagcttaatataatagaaagaatgccgataatggcaagcgccggccgccagccgaatacatcagtcagaagccccgttaacagcctgccgctcattcccccgatgcttgtgccgctgatatacaggcccatcattttcccgaggcccttcggatcaaactcctcgcctacatatgtcatagcgacagcaggaacgcctgccagaaaaataccgagcagccccctcatcgccaaaagcgccggaaaagccggactgaacgctgttaatagacctaaaacagaagtggctgttaacgacagcaccattaatttttttctgccgaatccgtcagacaacgaagcagcggccaataatgaaaatgccaaaacggctgttgagatggataaagttaagctggcagccgcagcggaaatatgaaactcttccgaaaacaaaggcataagcggctgtgtcgtgtaaagcgtggcaaatgtcacaaagccgctgataaacagtgccaagctggcctttctgtaagcctttgtatgaggctgaataaacgtcatgaatgtccctcttttctcactgttggttatatatgtatcgtacgcttttcatttcaatgtgtctaatttataataactatagaattaatgcgtgtaggttatgaagaaaggggagaaggagaaaatggagcttcatcaaattgacaacttcattgcggcggcaactcatcagcatttcacaaatgcggcaaaagaaagaatgatttctcagccggcattaagccgatcgattatcaggctcgaagaagaattaggcgcgccgttattttacagagagacaaaagccgtccggctgacaaggcacggagagcagttcttaataaaagcaaaacaagcgagacgagctttaaatgaaggcgttgaacaagtgaaaaaaaatatgagcctggagcacggcgaaatatctgtatcttttcttcatacgctcgggttgcgcttgatgcctcagctgattgccgaatttaaaaagctatacccaaacgtgaccttccggctgtatcaaggcgcaaatgaaacgcttcgcaaaatggtggaaacgggagatgcggatatctgtctcagctccccgccgcttcccagcgagcttttacaatggacagtgctggagaaagagcctctttatgcggtgcttcctgagaaccacccgcttgcagaaaataaaagcattcaaatgaaagagatgcaggacgaggattttgtcggatttaaaccgggatacgggctgagatatatgtttgatctgatgtgccgggatttgaatatacacccgcatctcgcatttgaaggagaggaagtgtcaaccatattagggctgaccgccgcgggtcttggggctgcagtgctgccgaaaaccgcggagcattcatactttccggtcgtttttctcccggttgcagattaccaatgcgaacgcaccatagcgttagcccagttaaaaaaccatgctctctctcccgctgctgagcgttttaaacagtttgcacttgattattacaaagcacgcaactgagcggtcattttattaaaatcgaagttgaaaataaagcagaaagaaatacagaaaacggaggataaccatggcgaaaaaaacagtgaaaacaaatgctgtccgtatcattgagcagcaaaacattccctatgagctattaggttacaaaacagaagggggacagcccgcagacggtctttccgtttcacaaaaaatcggatactctgccgaatatgtttataaaaccttagtggcatctgcaggaactgatcgttattacgtctttgtcgttcccgttgcaaaagaactgaatctgaaaaaggctgcgaaggcggcaggtgagaagaaaatagaaatgattgccatgaaggaccttttgggagtgaccggctatatacgcggcggctgctctccgatcggaatgaaaaaaaggtttcctacttttattgatagatccgctgaaacactggcgtttatgattgtcagtgcggggaaaatcggaatgcagctaaaagtagcgcctcatgatttagccgaagcaagcggggcggtatttacagacattgtataaatgtccggtggatctaatggaatacacgtttcaagggagaatgataatgaaaaaaagatatgaaaacttgaatggcgtgaagaatgaacatggattcatggacatgtggaaatggatgaaagaacgaagagaaaaaagtaaagatttaagcgagaatattccgaaagcggtcacaagggatgtccgtgatgttgccgtcaatcggacggaaaccgccataacatggatcggccattcttcatttctgatccaaatacaggggcttaacataatgaccgaccctgtatgggcgcggaggatgggttttcaaaaacggctgacagagccgggatatgaattgagcgaactgcctgacattgatgccgtgctcatctcacatgggcattatgaccatcttgattttccgagtataaaaaaactgagaggaaacccggatttttacgtgcctgcgggattgaaaaagctgttcatcaaaaaaggccgcaaaaaggttcatgaaatgaattggtggggtcgttttgagatgcggggggtgaatatatcatttgttccggcccagcactggacccggagaacgctttgggataccgatacttctcattggggaggctgggtcatagaaagcgaaaacggcgagtccatctattttgcaggagatacaggctattttgaaggctttaaagaaatcggagagaggtttcgtattaaggcggccctgatgccgatcggagcatacgaacccgaatggtttatgaaagtgtcacatatcaatccggaagacgccgtgaaagcttttttagagctgaaggctgacagcttcattcccatgcattacggggcattccggcttgctgatgatacaggcccggaagcattaagcagactgcacggtgagtgggaccggcttgcattacctcctgaaaacctgagagcattagcgcttggcgaaacattttggctgtaacagcaggttttcgctgccgacaccaatcgtttaaaaacggttggtgttttgttgtcaaccaaaggtgaacagcctcagtataaaacatgatttttccggaatctgcggtaaaaaacaaaactttttactcttttgtttcactatacaatgaaaacggtttcgtatgcgcggtatatttaacctatcacaattgctccagcagaaacggacaggaaggatagaaaaacagatgaaatacatgaattcaagacagaaaaagattttgtatctgttgttatctgaacctgatgactacttagttgtgcaagatttcgcagacagggtccgctgttctgaaaaaacgatcaggaatgatttgaaaacgattgaagatttcctgaatgaacatgctcaagctcagctgatccgtaaaccgggattaggcgtctatttacatatatctgaacaggaaagatcacggttaagccggcacatttataatgagcactttacatgcaggcacaagaccgatgaagaaagaatacttcacatcgcttatgatttattaatgaattcaaagcccgtttccgcaaaagaaattgccgcacagcattttgtaaacagagcttccattaaaaaggatatcagtgcggttgaagagtggctgaagcgatttgatctcacactggtttctaaacagcggctcggcttaaagattgaaggggacgaaaaaaacaaaagaaaagcattggcgcgaatttcagatttgattgataatgcggagtttacaagccaatttataaaaagtaagtttttaagtcatgaagcggactttgtgagaaaagaaatcaagttattacaaaaaaaccattctatctattttacggatgaaacatttgaaagtttgctgctgcatacattgctgaccatccgccgtatcaaaatgaaacagccggtcgccatctctgcaaggcagctggaggcggtaaaaaagaagaaagaatatgaatggacactggcttgtttaaaacggcttgagccggtatttgccatccggtttcccgaggaagaagccgtctatttaactttacatataataggcgggaaagtgcgctatccattgcagcaagaaaagaagcttgatcttgaagattctgagctttccaaagtcgtcaggcatttgatcaatcgcgtttcagaactgaaaatgctggatttccataaagaccaggaattgatcaatggattgaacattcatctcgatccggtgttgaagcggctgagctatgatctctctgtttcaaaccccatgctccacgacatcaaaaaaatgtatccttatttgtttcatcttatcattgacgttttagaagacatcaatcaaacatttgatctttatattcctgaagaagaggcggcctatttgaccctgcattttcaggcagcgatcgaacggctgcgccgaagcagtcataaccctaaaaggacgatcatcgtctgccatatgggcattggcatgtcgcaattgctgcggactaaaattgaacgcaaatttcatcacattacgataaaagactgtatcgcaaaagcggaactgacagagtatatcaaaaagcataaagatatagatttcgtcatttctacgatagggcttggaaatgtaacgatccctcatatcgtcgtatcaccgcttttggagcctgctgatgaaaagaagctcagcgcatttatgcaacagcttgatacatcacaccgccgggagcaaaaaacgtttaaaatgctgaatgatacgactccgtttctcgtttttttacagcaagagacagagcaccgttatcaggtcattgaaaagctggcgcaggctttgtatgaaaaaggctatgtagaaaaagagtatggcattcatgcagtaatgagagaaaaaatgtcggcgacaaatatcggggcgggtattgccatccctcacgcgaactctaaatatatcaaacaatcagccattgcaatcgccaccttaaaagagcccattgagtgggggacggaaaaggtgtcgcttgtatttatgcttgccgtcaaacacgaagatcaaaacaaggtaaagcaattattcagtgagctttcctatcttagcgagcagccggcatttattcaaaaactgacggaagaaaaaaatgtgatgacgtttttatcgtatttaaactattaaaagcaggggatggctccctgctttttttctgtttatagggaaaaatgccgttatttccggaacttatggtaaaaaaacgcgcttatcacaggctgatttcagtataaagttgagacaagatcttgaaattcagactgcaaaggaggatttatatgaaactgttagcgattacatcatgtccgaacggcattgcccatacgtatatggctgctgaaaatttacaaaaagcagccggcagattaggcgttgagatcaaagtggaaacccagggcggaatcggggtggaaaataggctgaccgaagaggaaatccgggaagcagacgcaatcattatcgcggcggaccgttcggtgaacaaagaccgattcgcgggaaaaaagctgctggccgtcggggttcaggaaggcatccgcaaaccggaagaattaattcaaagagcgcttagcggtgaagtgccggtctatcaatctgcttcaaaaactgaatccgcaagtcagcagggcaaaaaacaaaacccgatttaccgtcatttaatgaacggcgtttcttttatggttcctttcattgtcgtcggcggattattgatagcggttgcattgacgcttggaggagaaaaaacaccaaagggcttagtcattccggatgcgtctttttggaaaacgattgaacagatcggcagcgcttctttttcattcatgatcccgattttagccgggtacatcgcgttcagcatcgccgataagccgggtcttgtccccggaatgatcggcggatatattgcggcatccggcagcttttacgacagtgcgagcggcgcaggatttcttggaggaatcattgcgggatttttggcgggatatgcggcgcttggaatcaaaaaatgtaaagttcctaaagcaatacagccgattatgccgatcattattattccggtgtttgcctcactgatcgtcggtttggcgtttgtatttctgatcggcgcccccgtcgctcatattttcgcatcattaacggtttggcttgcgggaatgaaaggctcgagctcaattctcctggcattgattttaggagcgatgatctcctttgatatgggaggacccgtaaacaaggtggcctttctattcggatcggcaatgatcggagaaggaaattatgaaattatgggcccgattgccgtttccatttgtataccgccgatagggcttgggattgcgacgtttttaggaaaaagaaaattcgccgccgcagaaaaagaaatgggaaaagcgtcatttacgatgggccttttcggtatcacggaaggagccattccatttgcggcccaagatccccttcgtgtgatcccgagtattatggcgggttctatgaccggctcggtgatagcgatgatcggccatgtgggggacagagtggcacacggcggccccatcgttgctgtacttggagcagtagatcatgtattgatgttttttatcgctgtaacagcaggctctcttgtcaccgctctgttggttaatgtactgaagaaagatatggcgaaatcccccgcgcccggtgaggtgctgccgtctgccgcaccaaatgaagctgcagcggcaaaagaaacaaaggaaccatctcaggctgacagccgaaaagccgggatgaccgaaatcaaaaaactgactgacattatcagcacggacttgattgaaccgcatttatccggcgaaacgagggatgacattatcgatgaaatgatcgagaaattgtcccgtaaaggtatgcttctgtctgacagcggatttaaacaggccattttgagccgtgaacagcagggaaccacggcgataggtatgaatatcgccattccgcacggaaagtctgatgccgtcagaacgccgggtgtcgcattcggaataagacgttcgggtgttgactggaacagccttgatggttctgatgcaaaactgatttttatgattgccgtaccgaaggaaagcggcggaaatcagcatctgaaaatattgcagatgttatcccgaaaactgatggatgacagctatcgggaaaggctgctctccgttcagacaaaagaagaggcgtatgggcttctggaagaaatcgaataaagcgggggatgatcatgtctactgaaccgatatttttcaatccggttttcaaagaaagaatttggggaggcgccgccctgcgtgatttccactataatattccgtccgagcggacaggggagtgctgggcctttgccgctcatcaaaatggacagagcacagttcgaaacggcatgtataaaggatgtacgctcggtgaattgtgggagcatcacagagatttattcggaaaccttgaaggagaccgttttcctcttcttacaaaaattttggatgcggaccaagatctgtccgttcaggtgcatccggatgatgactttgccaaaatgcatgaaaacggggaacttggaaaaaccgaatgctggtatatcattgattgtgaaaaagatgcggagatcattttcggccacagcgcaacaacaaaagaagaactgatatccatgattgagcgcggagaatgggacggacttctgaacagagttaaggtaaagccgggagatttcttctttgtcccaagcggcaccgttcacgcgattggaaagggcacacttattttagagacgcagcaaaattcagatacgacttacagattgtatgattacggaagaaaagatgcggacggcaggctgcgcgagctccatttggaaaaaagtatagaagtgacagacgttccatctgtccgtgaacggccgaccgttcaatataaacaaacagatgatctgctggcagctgttttaatagaatgtccttatttttcagtcgaaaagtgggatgtaaaaggtgaagcgaatttattccagaatcatcccttccttcttgtcagcgtgatcgaaggagacggaataataattgcaggcgggcatgaacatccctttagaaaaggagatcacattctcctgccttccggtttgggagaatataaactggcgggccatgcaaagtgtattgtgtctcatctgtaatcttcaaaacccttctctggcagcagagaagggtttttcatcacttttacaaaaaggccgaaatttccgtggtccgttcctgaatttaatctctcaatttgtatatctcccgagccattgattcaagtatgtacatagcggggatttgggtggtgatattcgcattttcaacccattcttccgtcacgtaatatgaaatattcacatcagacattttggcaatggttgaatgtttatgatttgtaatactgatgacccggcttccttcttgtttcagctgattcagatgagtcaccgtagaatctccttcacctgaaaccgataatgcgatcgtgatgctgttatggcggaaatgggaatgggccggaaagtaaggatctttaatatacattgaaagtttccctaagcacgaaaaatatctggctccgtattcggcgagaattcctgaactacccactccgataaaaatgacgctttctgcatcggctgcaagggctgctgcttccttcagcttttcttccatccctccgcttactgttctttcaaaaaactcggcaacggaatgatggggactctttaaaatcgtttttttatttgcctccgcatacattttcagcttcaccttaaactccgaaaacccttcacagtttatttttttgcagaaacgtaaaatagaagccgtcgatacatgggtttcatttgccaattcacggattcgcatatagacgactttctcgctgttttgggagatgtagttgtataaagaagtttcaagctcgttaaatgaagcaatcatttcgtgtgtgaacatgcagggggattctcctttttatgagaatggtgaatgtacatctcatcgtaacatatcatttttaaaagaaacatagtgttatatttatgtgacaaatcactttttgtgtcattcaaaacaagacgtcagccaatgatttacggtgcaaaacaactgcggatataattcgttcatacgcttatgcatgatctcttcaagggtctctgacaaaagcggtcgaaaaaaggaggacaatatgagtatcaaactgatagcggttgatatggacggaacgtttttgaatgatgaaatggcatataacaaagagcgttttatgaatcagtatcgtgaattaaaagcgcggggaattaaatttgccgtagcaagcggaaaccaatatgcgcagcttacatccttctttccggaaatcaaaagtgaaatcgctttcgttgccgagaatggcgctttcgtcgtgaatgccggagaagaattattcgcgggtaacatgtctgaagacactataaaagaggtgatccgtgctttagagcagtatgaggtgaaaaacgtcattgtctgcggaaaaaaaagcgcgtatattcatgaaaatgccagtgaggatgaatatctgcatgccagtaagtattattatgtgttaaaaagggtgccgcattttgaaaacatcgatgatgacattttaaaattttccatcagttttcccgccgaacattgttccgcacttctgaggcatttaaaagacgccatcgggtctttcgtcacgcctgtatcaagcgggcacggtgacatagatctgatcataccggggcttcataaagcaagcgggattaggcttctccagaaacaatgggggataaatgatgaagaatgtgcggccttcggagacagcggcaatgatttggagatggtgtctgccgtgaaatacggagtcgctatggataatgcgcaggaaagcattaaacaggccgcggcgcatatcgcgcaatcaaacaatgaggaaggggtcttaaacgcgattgattccattctcaaatgtgaaaaaccctttgtctgaaaaagacattttaactgcggaggtgctgaacgatgattaaattagtgattacggatttagacggcacatttttaaataatcaaggcgattttgacagaacgttatttgaaaagacaaaacgagtaatggaagaacagcatgtcgctttcgccatctgcaccgggaaacagtgtgaaagggtggaagccttattcggagaagacgcgaaagatttttggattttaggagacagtgccgcacgtatgaaaaagaacggcaaattcgtatatgaatctttgatcagcaataaagccggactgtcaattataggcgctttagaaaaaatcagctgcgggcacaccattatcgcgtgcacaaaaaaaggcgcgatcgtaaaagaaaatctgtctgaaagtgaaatgaaatatgtaaatgcctcttatgcacatgtaacgaaaataactgattttactgagataaaagacgattttatcaagattacggttcatgaccccgacgccaactgtccggaaacgagagaaaagctgcatgaattttttcaccaattatatatcgtagcatcagaagatacctggatggacatatcaaatatcggaatacataaaggatcaacagtacaagaactgcagcgattattaggggtttcggctgatgaaacaatggcattcggagacggccgcaatgacaaagaattgatggaagcggcttcctacagctttgcggttaagaacgccattgacgaaataaaagatgcggcgcactttgtcatcaaatcaaatgacgaaagcagcgtcatgcacacgattatgagaatattagcgctgcaaaaacaatgagaaagcagatgggctaaagccaatgcggcaggacttactaggaaaagaaaaagcgggctatcctccgactttaaatcactcctgattttccgaaaatatgttaaaaatgaataaatatctatatttgacccaattgtattggtataatatgtataaaatgaatgaaacggcgtaatatcaagatgaaataaatcacttcatatcatttgatatcagacaaaaagtaggaacttcctcgttttgaaattgggaggtgtttgtattagcccgctgttgagtcccgcgtatatcattctcatttttcttccagcagcttcttttctgttagggattttaggatatttcatcttcaaaaaagtatggatgatggttgttattgtattcattttgtccttgatatttatgtttattgtaataggtgccgaaccgacatttttcatttgggtggctatgatgacggggagctgttttatctccggttcaatcactaagacggtatggacttttgtaaagcgaaaatattagacacagaagaatcctgtttgaacagctatccttttttgccgattgaagaaaaggaagtatagagtgatctgttatgttcttatattttgtctgttattgtattgtctgtgtatcgttttgttcttttttaactaaacggagcgctataattgaactgcagatatatagaaacacaaaaaaggataaggaggatttttatgtttcaaaccttagaccattttttgaaatcttgggaattcgaagccgatgcgacacaaaaactgctgaatcatctgactgatgaatcacttaaacaagaaatcacttcacaacattggactttaggccgtattgcatggcatactgtcgcggccattcatatcattacctcgaacacagatttaacgttccacgctccggctgaagattatcctgttcctgcatcggcgcggtttattgctgagagttatcatcaagccagtaatgcatttgtgcaggcgttaaaaacgcaatggactgacgatacacttcaagaatgtgtcaactttattggtcagcaattgccgaatggttcacttttgatgtttttaattcaacatcaaaaccatcatcgaggacaaatgactgtccttatgagacaagcaggtttacctgttccgggtatttatggtccggcaaaagaggaatggacaacatttggtttggaagctccgaaataggatgttgttgtaagggctcgaacgaatagatgataccaatcaatgttggtatcttttttgtattagtcttcgtgacatgcagacgaatcaacagttcaaaaggtgtaaagtgagttcaataactgcagaaaggcgattatgatgataactaaaatgactcaattcaatatgaaagacttcaataaaccaaacgaacctttcgttgtttcagggagaatcatcccttcatttgaaaacaatgtttggacatatacagaggagaaatttgctgaaccttatgtcaaaaaatatgacgatgaagacattgatgtcagttatgctgaagaagaggataaagttgtctttttttattacgcagagaacgactgtgtcggccggagtaagcttcgttctaattggaatggatacgcactgattgaagacattgccgttgcaaaagattatagaaaaaatggtgtcgggacggctttattacataaagcgattgagtgggcaaaggagaatcatttatgcggtcttatgcttgaaacacaagatattaatgtttcagcttgtcatttttatgccaaaaataactttgtcataggagcggtcgatacaatgctttattccaatttttcaacagcaaatgaaattgcggttttttggtactgtaaattttaaatataacagtatttgatgtttcgtcatttagcgggtgtgtgccgcaaagtattcaaaacatcggcttgaggatttataataaggtatatcaatcaatgcagggggagttatgtatgaagtgcaaaaaaatgaacagggtacaattaaaagagggaagcgtatcaatggccctataaactgcgtctgccctcattaatggagggaaatttgtgaatacgccttattcacagtcagctttacggcacaaccaagtgttcatttggctttgtgttttgtcatttttcagcgtattaaatgaaatggttttgaacgtctcgttacctgatatcgccaacgattttcataaactgccagcgagtgcaaactgggtgaacacggcttttatgttaacattttccatcggaactgctctgtatgggaagttatcagatcagctgggcatcaaaaaactgctcctatttggaattatggtaaatggcttcggatcgatcattggatttgtcggacactctttctttcctgtactcattctggcccgatttattcaaggggctggtgcagccgcattcccggctcttgtgatggttgcagtagtacgctatattccgaaagaaaacaggggtaaagcatttggtctgatcgggtcgctggtggcaatgggggaaggtgtcggaccagctatcggcggaatgatcgctcattatattcactggtcatatttgctgcttattccgacagcaacagttatcaccgttccattcctgatgaaactgctggaaaaggaagaaagaatcagcgggcgctttgatatgacggggattatattaatgtctgcaggcaccgtattttttctgctgtttacaacgtcatatagaatgtcttttctgatcatcagtattctggctttcctgatatttgtgaaacatattaggaaaactcaagatccctttgttgaccctgcactggggaaaaatgttttgtttatgacgggcgtccttagcggaggcctgatattcggcactgctgcaggatttgtgtctatggttccttatatgatgaaagatgttcaccatttaagtactgcggcaattggaagcgggattatgttccccgggacgatgagcgtcatcatcttcggttacattggaggattgcttgttgatcggaaaggttctttgtgtgtgctgaccattgggattgtattgatgtcttccagctttttaatcgctgcctttttcatagatgcggcaccttggcttatgaccgtcataatcgtttttgtgtttggggggctctccttcacaaaaacggttatatctacaattgtgtctggcagtttgaaacaaaaggaagccggcgccggaatgagtctgcttaattttacgagctttttatcagagggaacgggtatttcgattgcaggcggtttattatcgatcagcttgctgaatcaaaggctgctgcctgttaacgatgatcattccgcttatttgtacagtaatatgctcattctttttacaggaatcgttgttatgagctggctggtaaccatgaatgtctataaacgttcgcgaagaaatgactaaaaagggaaaaggatcaaacttgataaaagttttgatcctttttttaaggagcttccttattacggaaccttttgccgatcaatgaaaggggcgttaaagtgaattacatttataagaaaaaggaaaagaaaaatggaaaattgtatcatttcaatcagagataaatgggagaatgcacttattgagtctgaacaaaaaaataatcgtaatcaattaccgtaacgagaaaacaaccaagttttcactgccaatcgagacttttgaaaaagtgtatgaggatattaaaataggccggagagaaagttaatcactgtttgaaaatgactatgaagttcgtaagcggtatggttttaaccgcatctggattcccctggcaaagtaaaggtctttagggatttatgtcaaaataatagtaagtaccttatgcaacagggagtttggttgcttcataaggagggggaagtatgaaaaataagattcacatattgggagcctctggtgtcggaacgtcaacattgggtgttgcattatcaaagcatttgccgcatacgcatcttgatactgatgattactattggacagataaattcactaaaaaaagagaaatcgctgaaagaagaaagttacttaaaaaagacttgacaataaatgagaaatggattctttctggcgcagtgtgccgctggggcgatgatctaaaaagttattttgaccttgtcatcttcttatggattccgcaggatatacggcttgagagattaaggcatagggaatttcagcgttatggaaacgaagtgttagccggcggcagtaaatatgaacaatcaaaaacatttttagagtgggcttctttatatgatcattccggaatggaagttagaagcaaagctttacacgaacattggatgtcggatttatcttgtccattgttaaaaattgaaggagattactcagtcaatgaaagagttgatcgtgtcttggattatctgaattctaattaaactaacggatggagataactgcaaaatccaaaagtcaaagacagttccggccattttaacggagctgttttttataccgccttcagtttgtctgttgtgaagtgatttattctcggaaagaagcagcggaattaatagagaactcacttcgggaaaccgtgaaggcaggaatcaaaacgggagacttggcggtcaatcatcaacgtcagactttgcagaagaattgcagaaatgatcggatgttaaggcggaaaataagaagtgagaagcagatcatcaaaacgcaatacacctcaatttatattttcagtaagatcggctctgctcattaaaaaactcaattcgaagattagcggcatcaatattgccgcagatggggttagtgacataaagaggaagggataagaccccttccttaaaacctttaattcctctaatttcattgtcagatatattccttttttgaaatgggtatccaaatttcacttttaaaagatggcgatgttacatccttatgctcgttccacaggatttctgggccttcaatttgttcataatgtgacgatggaaaccattcggaataaatccgcccccatacttcctgcagtgcatccggaaatgatccggctgcttcgaatacagcccatgttgaggcagggacttcaagctgtgataggtgatttgggcaatgtttcgttgtggctgcgccaatatagtgatcaagctctccgttttcctctgtcctgccttcagaaaagttcgtggatgcactgatgagtcctgcaggcgctgtattagaaagctcttttagttgtttgattgctgcttcatctaaactttcccacatcgatgcaatgtcaggattcacgcctttgaacaaaatagggactctttttttaatgccgacgatgcgaaatgcctctttttcttcaatgcgatagttcatttcatttcctcctttgattgataactggaaggtcattcgcggataagctttaagtgaatggccattatgtttaacttctgatgggtttatgccatgcagattttgaaatgctcgtgcaaaagaatctggtgagtgataaccgtattttattgcaagatcaatcacctttacgcggctgtctttaagttcaaaagctgcaagagtaagacgtctgcggcgaatatattccgataatgaaatacctgtaaggaaggaaaacatccttttaaaatgatattcagagcagaaagcaagccttgctgcttctttgaaatcaatagcgttcgtgaggttttcttcaatatacgttaatgcgctgttcatccttttaagcgaatccatttatttgacctcctttaacaaaagaataacaggagcgaaatgtatctgcccgacatttcgtgcacagttttgcaggataacttatatgtaataaattaagttactcacctgtatttgtacagataaagaaaacacctaataactgcttgggtttcataagatgaaagaaagttatcattgttttatattgaaaagaaaatagaaaaagacggagttttcttgcgggaggggtttactatcaatcaattgaaagctgcatacgcggaggcagttaaaaaattttagttgatgtcgagaacgatgttcatcttcactgcttgttcaattagaggaagtgattcttccttaagggagatcactttttttattcgactaaagcagcagtttagcggaagaaggagaaaaatcagttgacttacttgaatactgaataggtgtaaaaagtggttattcatacggattgaaaaagaagaacacgcagcagactcacttgctcttgtttggggcaagtgttgacaaccctattagctggtttaattaaagaaggggtataaaacctgtatcaatgatgttactagatatctgcgacacaggttttatatttagctaaaatattcttatatattccacattgcatttttttattatgcaatagttcactctatttctgctttcaatttttcgaaccactctaaattaaccaagtgatgtgaacgggaattttcattcatacggcgaaagtaattgattgtgccgggaatttcttgagtgatggacaggtattcatcaaggagctcgattcgagttttagtctgatcgatttgtgattggatcagttccagtaatttatttttgtcgaattcatcggcaaagagtaacgccccataaaattgcaggttcacatattccgatttggtgccgtatttgatcattaatttttcaaattctgcccttcccgaatctgtgactttaaagttacggatttcacgcccgctggttgagggtttctgctgaatctgttcaatcaaacacttttcttcaagttgctgcagattgtaataaaatgaacctttcgtgaagttaacaatgtatttgtaatgacgtttttccattaaggccagaagttcatagccgtgagctccggggttttggatgagcaagccaaggataagtaagggaatcatggtttcatcaccttctccatccgcgcctcaaattccgcgtacgtgattttacccgaagccaaatccatactatgaaggtaaatctgttctgttttagaatagtcacccttcactttcagtgattgctcctctcccgaaatgggtttcaggatatggtgctttttcgagaaagcctcgaaatagcggtaaccgaatttgcgttgtgaagctgcgtctaaatgaatgccatcaggattcgcagtcaaacctgcagcagtaacaaaataacaattctgttgttcattagcaaaacgcagcaattgttcattaacctgtcgaaattcagtcgcgtgctgtccaaaaccggtcttcccaagaaagtcaccaagccctccaataatcaacggtacatcatcaagtttcaactcgtttcttagcgtctcaatgataagagttaatttctcgtaataagtttcatgcagcgaacgataactgtcactctcaccttggtgccaaaggattccgcaaatttgactggaacggagggcgaagcgggcttcggacaaagcatgctgaaaaaggatgccttccggatgccagtcattcaatgaactgccgccttccgcacaagggatcaagccaatttcttcatcgggatgagctttcgaccaagcatctgcaaaagatgccgccaagccaacgccggaaaccggacggtcgtaattaatcggctctgtcatcatctgccactgtccattgcgcagcatttttattttttcattatagatagggtctacttcattcaaaaatccacggcccgccatattcgactgccccaacattaaaaaagactttatcatttaatttttcacttctttacatcaatattttagtctaattagactatagtcaattcagcttgtcttgtaaagttctaataaggttttacttttattagtagtatgtatgaaaagcaaactaacattgaaaatttggtggatgtatttgagaaatagcaagttcttttgctttagatcttgataaacaatgaaaaacaacaaaaatcctgtcatgtaagggttcctatgaggttcaaaatcattaaaaaggttaacgattgtaccaattctattcatttgttatgttttacttttaaatcctgaagttatacttgaagaggaatgtcctaaaatgcagaaaaagccgggatgtcagatccggcttttcgctcactttcctttcttcttccgcttctccttttccgcccggtaaaactcatgaaacatcttcatcaatgcgcgtttttcaatccgcgacacgtaactccttgaaatgccgagctcctttgcgatctcgcgctgcgttttttctttttttagatcaagcccgaagcggccgacgatgacttctttttcgcggtcgtctaaaatatcgatatattttttgaccttttcaagttccatgttgagctgaatggtgtcgatcacatcctcgctttccgacttgaggacatcgatcaggcttatttcattcccttctttatcctggccgatcggatcatgaagggagacgtcttttttcgtttttttcaatgcgcgcagatgcattaaaatctcattttcaatacatcgtgcggcatatgtggcaagcttcgtgccttttccggctgagtagctttcaattcctttgatcagcccgattgtaccgatggagatcagatcttctgcgtcctctcccgtattttcgaattttttcacaatatgggcgactaaacggagattgtgttcgatcagcatgttgcgggcatgttcatcgccttcagccataaggtctaagtattttttctcctcactatttgagagcggttgtggaaaggcattatttttcacgtatgatactaaaaacacgagttctttcacaataaacccgagcgctgcaaaaacacctgtcaccatcctcacctccacaaagttatgtaggcaaaagcctatatgtaactgtatgtggcagtcaggctgtttgtgtctgtacagggaaattaatcaaaggcaggttttatttcttacagcctcttgatttttgctgattgagcctgtatattgttaaaaaaagtaagggtgaaaagaatataacgaaaagcgctgaagagacgagtagacagatatcattcatgacagagagctccgggagctgtgaaggagtatgaatggatgtgttgaaacaaacctcttagcttcgcatcggaatcatgaaaaacgaggatgatgcggcggatactcctgttaccgagtaagttttgtacccggcaagaggccggcaccaaaccgaattgaggtggcatagcgggctgtttcccgtcctcaagactttattgtcttgagggcgttttttatttctaagggagggataagatgaaaaacctgaagtcttggcggtacccgatgcttctgttaaccggaatcgggatagcaaatattggtgaatggatttattttttgtctcttaatcttattgttttaaaagaaacggggtctgcttttgcggtttccatcctttatttaatcaggcctgcggctgttttgatgacaaatgggtgggcgggcagcatcatcgacaggtgtaacaaacggaatatgatgatgtcgcttgatttcatccgggctgcattcattgccgttctgccgctgatgtttactgtaaggtctttgttttccatttattgtatcgtgtttttgattcaaatggccaatgcgatgtttcgtccgtgttccatggcgtatgtgacgatgcttattccggctgaaaggagaaaacgattcaattcactaagggctttgtcggaatcaggggcttttctcctcgggccggctgcggccgggctgctttttatcgccggcacgccgatttttgcgatttgggtgaatgcggcggctttagtgctgtccggtttcatcacgatgatgctgccgagccttgaaaatgagcctcacgtacattctcccagacagaagctttctttggcagtgtgcaaagaagattggaagctcgtctatcgcttcagccgaacggcgcgaaacgtcatgatcatttattttttattcagtctggtcatgaccgttatgccatccgcgcttgattcgcttgaagccgctttttcaaaagaagttcttcagctgactgatgccgattacggttttcttgtcagtgtctcaggggcaggcattattgcgggggcgcttgtcaatgtaatctttaataaaaaaatgccggcttctttattgatgggaatgggctctttattcacagcggccggatatatgatttatgcgttttctgacgttttttggacggctgctttcggatttttccttctcgctttttttctggcgtttgccaatacaggctttctgacgttttatcaaaagaatgttccggtggacatcatggggagagtggggagcttttattcattagtcgaagccgtcttcattatattggtaacggcggttttcggagcggcggctgtcggttcttccgtccgcgtcatcgtcatcgcaggggctgctgttatgctggcgttggcagccgttttatgctcgttcttatttgcggcctcaaaaaggaggactcccgatgtgtttcaagcggatcaatttaaagaaacataaagagacggccgtttcatttcgtgaggatgagtatctcaggtggctgtcatcccaaatctaatgctcacccgacaattttaagctgcttcttcataacgggcagccgatcggacagcttgaagcttccatcaacttttaccgcagccaaaaaatcggttatgtgcacctttactgagcagcaaagagaacgcggaacgaagctgcatcaatttagaattaaacggaaaagttctcagaatgagaggagccgtaccgccggaataggaggcggtacgcgcttcattttttcgttgtttttaaaagaccgggaaacttcttataaatgaccgccattaagacgagcatatacattccgtaaatcccgaaagacagcagtttgttgcttgtaaatgaagcgcctgcgacggtcacgatcacaatgttcggaattttgccgagcaccgacgcagaaaaaaagatcggccatcgtatgttactcagcccgcagacggtattcatggcaagcgacggtataatcggaatcagccgcccgaaaagcaccgccgtaaacgcgtgctgatgaaatgaaccttcatattgagccgcggccgggtaagccaccagtttttttctggcccagtctctgaatccgtaccggacgagaaaaaacaatgccattgttccgagcattgcgcctgacaatgtaatccacactccgtttacaatcccgaaaaccgctccgtttaaggccgcgataatggcgaatggaacgatcggaaaaaatacgtcagctgcgaccagaaggatactcataagcacggcatacatgccgcccgcgcgaatcatgctgagccagacgtctttttgcataaagccgatcatcacgacagcaatgatgacggcaagactgaatcccttttttatcatctgtacgttcacctcttttcaattagtatacagcacaaatctatctccttctattaaaataagctgtccgataagcgtacttgtttatcagcatttgccgtttgatgagaaacggctggcagccgggtttggacaaaaacatgcgggaagcgggtgatgtgcatcatttgatgcagagaatgattttatacaaaaggggacacgttaacagtagtgtttactggaggtgtaaacgttgagatgctttcatctgatcatcatgatatgcgtcctcacgggtctcactgccgtgtccgccgatgcgaaatctttaaaaagaagtgacatggagaagacgggaaacgtgtactgggatataaggtctgaaaaaaagaagctatctttaaccttcgatgacggcccccatcctgtctatacggaggctgtgttagacgtgctgaaacagcacaatgttaaagcaacctttttttgtatcgggagccgtatagacaaataccccgtaacggcaaaacgcatcgttgaagaagggcatgaaatcggcaaccatacgatgaaccatgtttattttcaccgtttaaaacgcaaagacattttacaagagcttcacagctccgcgcatcatatcagatcgctgcagccggaaggggacaagttattccgcccgccgggagggtcgctgaatcatacggctttcaaaagcctcttaaaagagggctatcatatcatcatgtggtcatggaaccaagatccgagggactggaaaaggcccggaaaaggaaaaatcgtcaggcacgttgtttcacatgccagagatggagatatcgttcttctgcatgacggcggaggaaaccggcgccagacggttgaggctttgaaagaaatcattccccagctgaaaaagcagggctacacgtttgttaaggtttcggatttgatcggacaggattccggtccttttcatatccagtaaagagagcgccgcgttgaaagccgccaaagagatgtgtaccataggaggtaaggtttggggggagagaaaatgaagtttgctgttctttttattacgataacctgtctgttatcaggatgcgctgcgggcaaagagaaaagtgttgtcgcgttcggcgacagcaatacgcgcggttccaactgggattatcgtgattatccgaaggcgcagcagtgggtaaacattttaaaaacagcggaacgcggccgtcttacggttataaatgcgggaataggcggccagacgactgaggatgcgcgcctgcgctttcaaagcgacgtgctggagcgtaagccccaatatttatttatcatgttcggaacaaatgatgcgggcattttgacgggagatcagccgcgagtatcaaagaaacggtttaaagaaaacctgacttatttcataaacgaaagcagaaatcacggcataaagccgattttaatgacgtgcatcccggttatagaaggaaacggaacgcatcatctctattactattcgagatataaagcctcagcctttaaagaaaaaggcggcgcgagaacatggcataattcctataacggcgttacgaggcaggttgcagctgagttgaaagtgccgctggtggataactggaaacactttatacgcgcggacggcggcaaagatacagaccgggcgctgatccaatccggactgatagatccctccggaaatcatatgacgccaaaaggcgccagaatcttaattgaaggcataaaaaatgggcgggttttggaacgctgacgccgtcagctgcctaaaccgttttgcttctgcttcataggctgtagaaaaaacatcttttggaggcgattgctatgaaccgcggtttccctccgcaatatcctgtatgcccgcctcctcgggtgaatgcggggtactggtacgcattttttgttgtgctgctcgtcgtcattctcgttctgggcggtctgtattggttcaatatatagcagccgtcctcttaaacacctctattttaggggtgttttttgttgaaagtggtagtaatgcgcataaccgaagtgatataatatcagtcatctgagtaaaaaaaggaaattcgcccgggaattttttctgtttaagaagaaacggaaataatgtgtccgagcgatcttcttttgatttcgttttcaattaactcgataaattcacggctcaaattcatttcattggctttgaaataagattctattagtaattcatcagaaagctttctcatgccggggacccaattaatgggagtggcacctccttacaattgtaatcaatcatcagacgcaagcatatgatggaaggttgcgtttcaatcatggtgaggttatctttaatctaccatgaaatacaaataagaacaatcgttctgttatccacactcgtaagtggataacttgttagtatcttgtttataatctggataaatccggatgtaataagagtggataatgtgtgtaattttatccacaactggtgaagaaacccaatttttgtcgaaatttttttaccgagtccgactttgtttttaaatctgacagatttcgacatatagatgatagaaagaaaaggaagggtgcgggttttgttaaaaaagttttttttacctgacgaatttgtgaaaaatatatttcatatcacaccggaaaagctcaaggaacgcaatgtgaaagggattattacagaccttgacaacacgcttgtggagtgggacagaccgagtgcgacacctcgattaatcgagtggtttgaagaaatgaaggagcacggcattaaagtcacgatcgtctccaataataatgaacgaagagtgaaattattctcggagccgcttggcataccgtttatttataaggcaagaaaaccgatggggcgcgcctttaaaagagctgtcagcagcatggagctgaaaaaagaagactgtgtggtcatcggcgatcagctgcttactgatgttctcggcggaaacagaaacgggtatcatacgatcctcgtcgtgcctgtcgcttcctctgacggagtcatgacgcgctttaaccgccggattgaacggagaatattgagttctttgaaacgtaaaggccatattcagtgggaggattaggaatggaaaaggttgtttgcatcggctgcggagtaacgatccagaccgaggataaacaaggtctcggatacgcgccaaaggcatcgctcacgaaggagaatgtcatttgtcagcgctgcttcagactgaaaaattacaatgaaattcaagatgtttcattaacggatgatgactttttaaatatcttgcacacaatcggcgatactgactctctaattgtcaaagtcgttgatatttttgattttaacggaagctggataaatgggctgaaccgctttgtcggcggtaatccgatcattcttgtcggtaataaggccgatatcctgccgaaatccgtaaagcgggaacggctcgtccaatggatgaaacgcgaagcgaaagaatacggcttaaaaccccttgatgtctttttaatcagcgcttcccgcggacaagggatgaaggaagtcattgacgccattgaacattaccgcgaagggcgggatgtgtatgtggtggggtgtaccaatgtcggcaaatccacatttatcaaccggattattaaagaggtctcaggggaagagaatattattaccacctctcaatttccgggcacgacgcttgatgcgattgaaatcccgcttgatgacggatctgcgctttatgatacgccgggaatcattaaccatcaccagatggcgcattacgtggacaagcgtgacttaaaggtgctgacaccgaaaaaagaactgaagccgcgcacttttcagctgaatgaaaaacaaacgctttatttcggcgggcttgcccggtttgactatgtatcaggcgataaaacggcgtttgtctgctatatgccgaatgaattgatgattcacagaacaaagcttgaaaatgctgatgccttatacgaaaagcatgcgggagaactgcttaccccgcccggaaaagatcatttggatgaatttccggagcttacggcccacacgtttacgattaaagaaggaaagacggatatcgttttttccggactcggctgggtcacggtgcagcaagcagataaaaaaataacggcatacgctccgaaaggcgtacacgtatttgtccgccgttcattaatatagagagaaggggagagggagcatgaaacaattgtacggagtaatcggaaatccgatcgggcattcaatgtcacccgatattcataacgcggctttgcaagataagaacatcaacgggcagtattttgcgtttcaggtggaacctcattatctcaaggacgccgttaacggaatcaaggcgcttggcatctgcggagtgaacgtcacagtcccgcataaagtcgcgatcatggagcatctggatgaaatacatgaaagcgcgaaagtactcggggccgtaaataccgtcaaaagagagggagacaggctcatcgggtataatactgacggagatgggttttataaatccttagtcaaagtattggacaaaccgatatcagagctctccatcctcatgattggggcgggaggggcggcaagagcgatttttacgacgatcgtccgcagagagccgaaacaatttgacgtttgcaaccgcacgccggaaaaagcggaaagtctgattgcggctgctccctcttttcagcagaaacgcgcccttactttaaaagaagctgaaaatcagcttgaacaatatgacgtcattattcatacaacatctgtcggcatgtatccgaaaacggatgccgtgccgctctcattggaacgggccaaaacgggcgccatcgtttgtgatatcgtatacaacccgattcaaacggcgttcttaaaagaagctgaaaaaagaggtttaacaacccttgacggtgtcggcatgtttgtggaacaggctgcactgtctttcaagctgtggacggaacaagagcctgacagcggcttaatgagagcaattgttgaaggaaaactaggaggaacacaatgttaacaggaaaacaaaaacggtttttgcgttcaaaagcgcatcatttaacgcctatttttcaagtgggaaaaggcggagtcaacgaaaacatggtgaaacagattgcagaggctttagaagcaagagagctgattaaagtcagcgtgcttcaaaactgcgaagacgataaaaacgatgtcgcagaagcgcttgtgaaaggcagccgctcacaattggtgcagacgatcggaaatacgatcgtattgtataaggaatcaaaggaaaataaacaaatcgagcttccgtaaggtggttgacatgaagaaaatcggaatattcgggggcacatttgaccctccgcacaacggacatcttctgatggctaatgaagtccttcatcaggcggagctcgatgagatttggtttatgcccaataaaatcccgccgcataagcagaatgaagactttacagacagccggcaccgggtggagatgctgaagcttgccatcagctctaattccttctttaagcttgagcttgcggaaatggaccggaaaggcccttcttatacctatgataccgtccgtttactgaaggagcggcacccgaacgacaagcttttctttattatcggggcggatatgattgaatatctgccgaaatggtacaaactggacgaactgctcacgctcattcaatttatcggagtgcggcgcccagggtatcatatcgagaccccgtacccgctgctttttgccgacgttccggaatttgacgtttcgtcaacgatgcttagagaacgtctcaaagcaaaaaagccgacgcaatacttaatgccggataaagtgaggcagtatatagaggagaatgatttatatgaatcgtgaggaagcacttgcctgcgtcaaagaacagctgaccgagcatcgctacatccacacaatcggcgtgacagatacggcggttattctcgcaggccggttcggagcagatccgaaaaaagcggaaatggcggctatttttcatgattatgcgaaattccggccgaaagaagaaatgaagcagatcatcgtgcgggaaaaaatgcctgctgagctcttggattacaatgccgagctgtggcatgcccctgtgggagcgtatttggctgagaaagaagcggggatcactgatcccgaggtcttggatgcaatccgctatcacacgtcagggcgtcccggaatgacccttttagacaaagtcatctacgttgcggattacattgaacccggccgccattttcccggagtggaagaggtgcgccgtctggcggaaacagatctgaacgaagcgctcatacaagcgatgaaaaatacaatgatatttctgatgaaaaaaaaccagccggtctttccggagacgtttgcaacctataactggctggtgtctcaaaaacgacaggaggaatatggaaaatgaatcaagcttccgtattaaaaatcgcggcaaaagcatgcgacgataaacgtgcagaagatattttagcgctggacatggaaggaatctcacttgtagcggattactttttaatctgccacgggaattctgataaacaggttcaggccattgcgcgcgaaattaaagatcaggcagaagaaaacggcattgatgtcaaaaagatggaagggtttgatgaggcccgctgggttttagttgatctcggcgacgtcattgtccacgttttccataaagatgaaagaagctactataatcttgaaaagctatggggcgacgcgccgctcgcagagcttgaactcggcttgaactcatgatttaccaaggcttcgccggtgtatatgacgagttaatgtcccatgcgccgtatgatgaatgggcgggctggatcgaagcgtctcttccggaaaagggaagggtgcttgatcttgcctgcggaaccggagaaatatccatcaggcttgctgaaaaaggctgcgaagtcacggggattgatttgagtgaagatatgctgagctgtgcccagcagaaaaaaacaggaaagccgattctttttctccagcaggatatgagagagctttccggttttgaagaacagtttgatgccgtagtcatctgctgtgattccctaaattacttaaaaacgaaaaatgatgtcttaagcaccttcaaaagtgtttttcaagttttgaaggagggcggcctgcttctgtttgacgtccattccccgtataaaatgacggagctttttccggacagcacccatgcggatcaggatgagcagatcagctatatctggcaaagctttgccggcgatgaagagctttctgtcatccatgatatgtcctttttcgtatggaacggacaatcttatgaccgctatgacgagacgcatgagcaaaaaacattttacattgaagaatataaacaaatgcttgcagagaccggatttgaattgaagaaagtgacggctgattttacagaccggcctccttcaacagagtctgaacgtcttttctttacggcaggcaaaccaaaaaccatcgtttaaacggaacgatggtttttaaaatgcattttttgcgattggcgtgataaagctctttatggcatactcagttacacgtgaaattgcttcttcactaacgatatatcttcatcgtatttgtcatgtgtacgctgaaagacacgattgaacatatcctgaacaccgctttcgagagccttcagtccttctccggtgacgccgccttttacgcatactttttcctgcaaggcgggaagcgtgtaatgccccgtttcaagaagctttccgagaccgacaagcatttctgtcgacataatcacggcttcttctttggtgatgtccgtttcttccactgccgcgtcaataaagcgctgaacgagataactcataaaagcgggcccgcagctgacaatgtctgacgccgctcttgtaataccgctgctgatttccacaggttttgaaatatgagtgaacagcgtttgaatatccgcttttgcagactcgctgcagcttttgccgaacgtaacaagcgagacgccggccaaggcgcggttcgtaatgctcggaatgacgcgggccgtctgacacggaaccgtatgttcaatctgatccgtctgaacggggctggtaatggagattaaaatgtgatctttccgtaaatgcggtgtgagttttttcagcaaaggatatatatccagcggttttacacaaatgaatatgatttcattatcctgtacgagcttttcctgatcctcggtgacgtggatgccgctgaaacgttcttttagttttaatgctttttcgattgttctgtttgtgatggtgatatgtgagggatcggcagcgtttgattcgataaacgattcaatcaggatcgttcccatgtttccggtgccgataaagcctattttcaatgaattcccctcctttttcccttaatcctctaaaccttatgcggggaggcaatgcaatatgacgaaagcgatgatgacggagcggatgcggcggaacctgaaaattctgggcgcttgtcttgcggcaggtgcggtttttatctgtatttggctgtttcgttctgaaaaggaagagccggtcaaacagcagtccgtgctcggtcaaacagcctccgcatccgtcgcggacaaaaaagacaccgcagacgataagattatgattgatgtgaaaggagcggtccgaaatcccggcgtgtatgaaatgaaagcgggagacagagtgacgcaagccattgaaaaagccggcggcctgaagaaaaaggcggatgaattgaatgttaatttagcagagcagctgcaggacgggacgattgtttatattccgagtgaaggcgaagaggagaatcgcccgaaaacagcagttggtgaaaaggagaatgcagctgtcaatatcaatacggcatctctggacgaacttcaggcgatttccggggtggggcagaaaaaagcggaagctattatcgcctaccgagaagaaaacggacggtttcagactgctgaagatttgatgaatgtatcaggctttggagaaaagtcatttgagcggataaaaacttccattacggtaaagtgaattgacggttctgcttaaatctatgtaaacttagaaaagcaacaagactttttggagggaacacttgtggaacgaatctcatggaatcaatattttatggcgcaaagccatttgctggcgctgagaagcacatgtccgagactgtcagtcggggcaaccgtagtcagagataagcggatgattgctggcggatacaacggctcaatcgccggcggcgtccattgcgctgatgaaggatgccttttaatagataatcattgccagaggaccatacatgcagagatgaatgcgattctgcaatgttctaagttcggtgttccgacggagggcgcggaaatttatgtgacgcattatccttgtattcaatgctgcaaatcaattatccaggcaggcatcaaaacggtctattatgccgaagattacaaaacacagccttatgcaaaagagctgttcagccaagccggagtcaaggtggagcaggtcgaacttgatgaaatgatcatcgatctgaaaaaccgcgaaaaattgtcttttgtcgcaggtctgattcagcaattatctgatgcgggagttaaggcagatgaactgaaaaaaattcatgaacaggccaatgagctgtttaccagttacgtataaatgaaatataaataccttcttctgcctctggcggcggtttctgcaactgcggggattgccgccgctcatgtcttctgggttctgctcctttttcttctgtatcttctctttattatgataaaaacaaagcagcctgctccggttatcatctgcctcgtttctttttgtgtttatttctttctttatacggtttgtgacgctgtgaatgtaacgcggtatcaggccggcagttatactgaacaggccgtcatcactaatattccgaaggttgacggagcgaaaatgtcagccgttatccgtacacatgacaaggaaaaatgggcggcttcgtacaaaatccggtctcttgaagaaaagagacgcattgaacagcttgaaccggggatgcgctgcacatttacaggctctctggaacagcctgcacatgcgacgattcccgggggttttgattataaggaatatctttactctcagcagattcactggttatttaccgtgacttccattcagcagtgtgaaaaatccaaacagccgctgtttaaactgctgagcatcagaaaaaatttgatttcgatcattcggaatcacgtgcctgaatcttccgccggaattgttgaagcgctgaccttaggtgaaagattttctatagaagacgatatactgagtgcatatcaaaatttgggagtcgttcatttaatggcgatttccggaatgcatgtcggtcttataacggcgggattattttatgctctgatcagaatcgggctgacaagagaaaaggcggggatattgctgctgctgtttttaccggtgtatacgctgctgagcggtgccgccccatccgtattgcgcgcatccctcatgctgggattttatatcgccggaactcttgttaaacgcggcattcattcctctgctgcattgtctctgtcttatctgctgctcctgctgtttaatccttacctcctttggcaggcgggcttccagctttcctttgcggtaagcgcctctttaattctgtcatcctccattttaaagaaagcagggaaaagcagacttgccgggcttgcgatggcttcattcattgcagagctcagctcacttccgtttcttctctatcattttcagcaaatttcacttgccagttttccgatgaatatggtgatggtgccattttatacgttatttgtcattccggtttctgtcatcggtttccttcttcttttactttcaaggcagatgggagaatgtttgtttaatatgtttgaccttgtgatgaagcctgtgcatgatttcattacatatgcggcatccgttgatttatttactatgattgtgttaaagcctgactttctttcccttcttctgcttgcggtttccgtttttacgctttttgcggctttagaaaagggaggttttttaaaactcaggaaatcggctctttttttctgcgcggttttggcttatttaatatgccgtccgtatttcagcccatggggagaagcggatatgcttgatatcgggcagggagactcgctgtttataaacgcgccgcaccgcaaagggaccgtaatggttgatacagggggagtgattgcttatcccggagaatcatggaaagaaaaacgccacccgtattctatcggcgagaaggttttgattccgtttttaaacggaaaaggggtgaaaaagctggatgcgctgattttaacccatgcggatcaggatcacatcggggaagccggagtgttaatcaaaaatcatagagtcaaacggttaattgtccccgtgggattcgtaaaagaaccgaaggatcagaacatattaaatatggcgaaagaaaacaacattcccgttgccgaagcaaagcggggcgacaccattacagccggtgatcttcagtttcaggtgctgtctccggagtcgtctgacggaaagagtaaaaatgattcgtcactggtgctttggacggttttaggcggagtgagctggcttttgacgggagatttagaatcggacggcgaaacagaagtgctgaaaacgtatccgaaactgaaggctgatatattgaaggcgggtcatcacggcagcaaaagctcaacgagtgaagcctttttgaaacagcttcagccggaagcagcgctgatttcagcaggaaaagagaatcgataccatcatccgcacgaagaagtgctggatcgtttgaaggcgtactctgtcaatgtgcttcgcaccgatatcagcggaacgattcaatacagatttgaaaaaggcgccggaacgttttccgtcttccctccatatgatatagaagaaaccagggcgcaagaagtaaaaaagactgccgattgacagcagcccggaatgcggctaagagccgataagatggatggctgttgccatcacgaacaaaaaggcgaaaaatccgaaggacacgacaaaaccgacagctgagtcaacagcatcatttcgtttgctttgaacgtttttttcaaaatcattcaatttcatccctcctgacttccctaagtatactggaattgttttgaaaaatctagaagtgatggtaacgttttctgttcttgtgattatcgcctttttacaagcagacccgggagcttgtgaatcaggcgtttattataaatgaggaagctgtcctttttaaagcttcctctttactatttgccgaactcaatttaggatagaaggggatcaagaaagagaggaagtcatacgatcatggtatttgatgtttggaaagccctgaaaaaaggggatgtccgctccgtttattgcttatacggaaaagaaacgtatctgctccaagagactgtcagccggatcagacaagctgtcgttgatgaggagactaaagattttaacctgtctgtttttgatcttgaagaggatccgcttgaccaggccataaccgatgcggaaacgtttccgtttatgggagagaagcggctggttatcgtaaaaaatccgtcttttttaacaggggaaaaaaagaaagaaaaaatagagcataatacaagcgctttggagacttacctgaaggagcctgcgccttatacggtctttgtgattgtggctccgtatgaaaagctggacgaacggaaaaagctgacgaaagcgctgaagcaaaaagcccttatgattgaagctaaggagctgaatgcaaaggagacgactgattttacgattaatctggcgaaatccgaaaataaaacgatggatacagaagctgccgagcatttggttctgcttgcaaacggccatctgtcttccatatatcaggaaatacaaaaactctccgcctacaccggtgacagacatgagatcacgcttgaagatgtccgggagcttgtcgcaagaagtttggagcagaatatttttgagctgatcaacaaaatcgtgaaccgaaaacggacggaaagtcttcaaatattttatgatcttttaaaacaaaacgaagaaccgatcaaaattatggcgctgatcgccaaccaattccgtctgattatgcagacaaagtattttgcgggacaaggatacggccaaaagcaaatcgcttccaacttaaaggtgcaccccttccgggtaaagctggcgatggatcaggcgaggctattttctgaagaagagctgcggcgtattatagaaaggctcgcagtaatggattatgaaatgaaaacggggaaaaaggacaagcagctcttgctggagctctttctccttgagcttctccggactgaatgaaaaaaacgatccccgttaaagggatcgtttttgtattatgcagaaagtccgttcacttgtttcgcaagtctagatttgtatcgagctgcggcatttttgtgtacaagacctgttttcactgctttatcaatgcgtttcgctgcttcagaaagagcagttttcgctttatccgcttcgttgttagcaacagaagcttcaacttgtttgattgcagtacgcatagcagatttgattgtcgcgttatgagcgcggcgttcgttgtttgtttttgtacgtttaatcgctgatttaatgtttggcatgtgtttcacctcctaagatacaacctgtagcacagtgtcttaaggttaaatcttcttcacaatagaacaaattgtattctatcaaacagaactttagattgcaatataaatgtaaagtatttttcgttgatgggtaaattcgcatgattcgttttgtaaatggccacactatgtaccacgatgattgaaggaggtctttcctgtgaaaaacaacgaactggatgtcaatcaatttctgatacggacggatttagcggtagaaacgaaacaggcggtaaaagacggacaagccggtcagacaaaagaaataaacgggtttattgaaaaagaacgcgacaagggcggcattaaagtcagaaccgtcgatattaccaaagaaggcgccgagctatcggggaaaaagcagggacgctatgtcacgatcgaggctcaaggggttcgggaacacgactctgacatgcaggaaaaagtaacggaagtgtttgccgaggaattttccgcctatctgtcggcattaaagattccaaaggatgcaagctgtttgatcgtcggtctcggcaactggaatgtgacgccggatgcgctcggccctctcgtgaccgaaaaccttcttgtgacaaggcatctgttcaggcttcagccggaaaacgtgcaggaagggtacaggccggtcagcgcgcttgctcccggtgtgatgggattaacgggaattgaaacgagcgatattattcaaggtgtgatcaaagaatcaaagccggattttgtgattgcggtagatgctcttgcggcaagagccgttgaaagggtgaacacgaccatccaattttctgatacgggcattcacccgggatcaggcgtcggcaataaaagaaaagaattaagcaaggaaacgctcggcatccccgtcatcgcaatcggggtaccgactgtcgttgatgcggttacgatcgcgagcgatacggtggattatatattaaagcatttcggcagagagatgaaagatgacagcccgtcaagatctctggtgcccgccggaatgaacttcggcaaaaagaaggtgctgacagacgaagaccttcccggagaaaaagaacgccaatcctttctcggtattgtcggcacactggacgaaaacgaaaaacgccagctgattcacgaagtgctctctccgctcggccataatctgatggtcacaccgaaggagattgacacctttattgatgatatggcgaacgtgcttgcaaacgggttaaacaccgcccttcatgaaaaagtgtcacaagataacaaaggttcttataatcattaaaatggttctacctcctctagcttgttcatagagtaattactagacaagcgctggagggattcaaatcatgagaaaaaaacgcagaaaccgtcaaattgtcgttgcagtaaacggtggaaatgcgctcaagggcatgtttttgtttatgacaagccttatcgttattttcgtattatcgggtgtgctcacatcgcttcgccctgaactgaggctttcttcgaattctcttcacggaattgccggagaacttccgggtgacgcgtttgcacacctcctcggtatggaaaatcattatttcgcctcagagcttcctgaaaaagactcttttcagctgtcccggctttccttaaaactggcgacaagcattaatatggaagacccgcggagtttcttgggacgtgagctgccgggatttgcccaatacgatacggagatccttctggcggggcaggggactgattatacgaatatgcctgctgaatccccgccgccgtcaaaggtgatggaaaaagaaaaagaagtgaacctggcagaaatcgaaaacaaaacgaaaaaagaagaaaaggcgccgccgaaacattcaacaggcagcaaaaaagtcgtttttatttaccacactcataataccgaatcctatcttcctctgttaaaaggggaaacaaatccggataacgcccgccattcgaaggccaatgtcacgcttgtcggagatatgttcggaaaagcgcttgaagcgcaaggtgtaggagcgaccgtagataaaaccgacattcaggcccgcctgaacaaagacggtttaaattatgcgcgaagctacgacgaatcaaggccggtcgtaaaaagcgcgctcgccaaaaataaaaacctgcaatataccatagacattcaccgggattcccgccgcaagaaaaatacgacagccgacatcaaaggaaaaagctatgccagggtcgccatcgtcgtcggcaaaaaaagcgctaattttgaagaaaactataaactcgcaagtgaacttcataagctgatggagaaaaaatacccaggcttaagcgtcggtgttttatcaaaaggctctccgggagataatggagtgtacaaccaggatttaaacgatcggtcgcttctgctggaattcgggggcgtggataacaatcttgaagaactgaggcgcgcatcagatgccgtggccgatgtattcagcgaactgtactgggatgcagacaaggtcagctcgcaatcaggagagaagaaaaaacaatagaaatcaggtgatgcaaatgatccgttttaccggcaaatgcctgctgatcgccattgtcatgtttgtcggcgtattgttcggcatgcagcaggcaaacagcggaatgcttgatatgaaaggatacaaagatccctccttaaaaggagcattcacgctcggcggcggagaaggacaggaaaaagaagcttccattttggggcaaaccgttacggcgaaagatctggaagaaaaacaaaaacagctggaacaggcagaaaccttcaacctgttttcaaaagccggagaaaccctttcaaataccgtgacggactcggcacaggcgatgtatgagtgggtttcgaaactgaaccgttagcattgatgaagagaaaagcggatgattccttaaaggaagcttttctctttcttgttttaattgaatgtttacaatcctattgatataatctaagctagtgtattttgcgtttaatagtaggagtgatagattgtgacagataaagaaaagcgtttagagaggcagtcaagaatccggaatttctccatcatcgcccacatagaccacggcaaatcgaccttggcggatcggattttagaaaaaacatcggcgatcacccagcgggaaatgaaagaacaattgcttgattcaatggaccttgaacgcgaacggggaattaccatcaaattaaattccgttcagctgaaatacaaagcaaaagacggagaagaatatatattccatctcatcgacacgcccggacacgtcgactttacatatgaagtttcgcgaagcctggctgcctgtgaaggcgcgattctcgttgttgatgcggctcagggaatagaagcgcagacattggcgaacgtctatctggcgcttgataatgatcttgagattcttcctgtcattaataaaatcgatcttccgagcgcagagccagaacgtgtgcgtcaagaggttgaggacgttatcggccttgacgcttcagacgccgtcctcgcttcagcgaaagcgggcatcggcatcgaagacattttagaacagatcgtagaaaaagtgccggctcccgcgggagatccggaagctccgctgaaagcgctcatctttgactcgctttatgacgcgtaccgcggagtcgtcgcgtatatcagagtcgtagaaggaacggtcaaaccgggccagaaaattaaaatgatggcaaccggaaaagagtttgaagtcatcgaagtcggcgtcttcacgccgaaagcgcagccggctgacgaattgacagtcggtgacgtaggctatttgacagccgcaatcaaaaacgtcggcgacacccgtgtcggtgatacgatcacgagcgcggttaagcctgcggcagaagcgcttccgggctaccgcaaactcaatccgatggtatactgcggactttatccgattgacacagccaaatataatgatttgcgcgaagctctggaaaaacttgaattgaacgattcatctcttcaatacgaggcagagacgtcacaagccctcggcttcggtttccgctgcggctttttaggaatgcttcacatggaaatcattcaagagcggattgaacgggaatttaaaattgaccttattacgaccgcgccgagcgttatttatgacgtttatatgacggacggcgaaaagatcatcgtggataacccgtcaaacatgcctgacccgcagaaaatagagcgggtggaagaaccttatgtcaaagcgacgatgatggtaccgaacgattacgtcggagcggttatggagctttgtcaggggaaacggggcaactttatcgatatgcagtacttagacgccaaccgagtcagcattgtatatgagatgcctcttgcggaaatcgtatatgaattttttgatcagctgaaatccagcacgaaagggtacgcctctttcgattacgagctgatcggctacaaaccgtccaaactcgtcaaaatggacattatgctgaatgcagaaaaaattgatgcgctgtcgtttatcgtgcaccgcgattacgcatacgagcgcgggaaagtcatcgtcgaaaaattgaaagaattgatcccccgccagcaattcgaagtgcccgtgcaggcagcgatcggacagaaaatcgtggcccgctcaaccattaaggccatgcggaaaaacgtccttgcaaaatgttacggaggagacatctcgcggaaacggaagcttcttgaaaaacaaaaagaaggaaaacgccggatgaagcaggtcggctcggtagaagtgccgcaggaagcgtttatggccgttcttaaaatggatgacagcccgaaaaaataacggaagccgccgcagtcccgcgctgcggcttctttctgtaaagaagaaggtgtttcaaaatgaaatcagcttatattcatattccgttttgtgagcatatctgccactattgcgatttcaataaatattttattcagagccagcctgtcgataagtacttaaactcactcgaaaaggaaatgataaatacaatagaacggacgggacgccctgatctccgcacgattttcatcgggggaggcacgccgacatcgctctcacccgcccagctggaaaaattgatggattccattcaccgcgtgctggagccttctgacggactcgtagaatttgccgcggaagcgaatccggatgatttgtccccggaaaaattaaaaatcatgaaaaatgccggtgtcaatcggctgagcttcggtgttcaaacctttgaaggtgagcttttacaaaaaatcggcagagtgcataaacaaaaggacgtattcacttcctttgaacgtgcgagggctctcggctttgacaacatcagtctcgatttgatgttcggcctgccgggtcagacgctggccgatcttgacaattccgtcaaaacggctttgtctcttgatgcggagcactattccgtttactcgctgatcgtagagccgaaaacggtgttttataatttaatgcaaaaaggccgcctgcatctcccggcgcaagaacaagaggccgagatgtatgaaacggtcatgaggcagatgagtgaagcgggcatccgtcaatatgaaatcagcaactttgcaaagcccggatacgagtcgcagcataatctgacgtattggagcaatgaagcgtatttcggttttggcgcaggcgctcacgggtatatcagcggcacgcgcaccgtcaacgccgggcctgtgaaacattacattcagctcatcgaagaaaagggactgccttaccgtgacacgcacgaggtgacacgggaggagcagattgaagaagaaatgttcctcggtctcagaaaaatgtccggcgtacaaaagcaagcttttctcgataaattcggacgctcggtcgacgaactgtttcccgatgttctcaaagatttaaccgaaaaaggcctgatctgtgacacggaagaatcggttgcattaacgcatgagggcaaattattaggaaatgaggtttttggcgcttttttgggtgagttataattgacatttttcttttggtttgttacttttgatatagaattagcactcgctgaccttgagtgctaacaggggtgatgatgatgttaacaaatcgtcagctgttgatcctgcaagtgattattaatgattttatacaatcagcgcagcctgtaggatcaagaactctttcaaaaaaagacgagattacattcagctctgcaacgatcagaaacgagatggctgacttggaggaattgggctttattgaaaaaacccattcatcctcaggacggattccgtcggaaaaagggtacaggtattatgtcgatcatttgctgtcacccgtcaagctgacaaaaaccgatctggatttaattcactcgatatttaaagaaaaaatcttcgagctggaaaaaacagtccaaaaatcagcgcaaatcctgtccgacctgacaaactacacatcgattgtcctcgggccgacgctgagcgagaactatcttaaacagattcaaatcgttccgatccagccggataaggcggtcgccatcctcgtcacgaacacggggcatgtcgaaaaccgcaccatcaatttcccggctaaagtggatttggccgatattgaaaaactggtcaatatattaaacgatcgattagcgggcgtgccgatggacgaactgaatgagcgcatttttaaagaggttgtcacatatttaaggcagcatatcgccaactatgacagcatacttgaatcgctccgctccacattccatccggcggcccacgttgagaaattgtttttcggcggaaagatcaacatgctgaatcagccggagttccacgatattgaaagggtccgctcgctcttatctttaattgaaaaagagcaggatgttctgaagctgtttcagtcatcaaaagccgggatttcaatcaaaatcgggaaagaaaacgactacgaagaaatggaaaactgcagcttaatcacggccacctatacagttgatacgaagcagatcggatcaatcgcgattatcgggccgacgcgcatgaattattcaagagtcgtcagcctgctgcagcacgtgacttcggacttgtcaaaagcattcacaagtttgtatgatgaataagggaattttggcaatcattttcagtcatctttttacagcatttgagggaggtgaacacaatgtcagaagaaaaacaaaccgcagaacaggttgaagcagcagaacaagaagaagtgacagaacaggcagaacaagcggcttcacaagagcagcatgaagaaacggcaggtcaggaagaagcccttcagcaccaaattgatgaattgcagggtttgcttgatgaaaaagaaaacaagcttttgcgtgttcaagcagactttgaaaactataaacgacgcagccgccttgaaatggaagctgctcagaaataccgttctcaaaacgtcgtaacggaaatccttccggctctcgacaactttgaacgggcgttacaggtagaagctgaaagcgagcagacaaaaagcttgctgcaaggtatggaaatggtccgccgccagctgatggacgcacttgaaaaagaaggtgttgaagccatcgaagctgtcggtcaggaatttgatccgaaccttcaccaagccgtcatgcaggtggaggatgaaaacttcggcagcaatattgttatcgaagaactgcaaaaaggctacaaactgaaggatcgcgtcatccgtccttcaatggtaaaagtgaatcaataactacatagcaggaggtaattcaaagtgagtaaagtaatcggaattgacttgggtacgacaaactcatgtgtggcagtgcttgaaggcggagagcctacagttatcgccaacgctgaaggaaaccgtacgactccgtcagtcgttgcatttaaaaacggcgagcgccaagtaggggaagtggcgaaacgccaatcaatcacaaatcctaacacaatcatgtctgtcaaacgccatatgggtactgactataaagtggaaatcgaaggaaaagactacacgcctcaagaagtgtcagctattatccttcagcatctgaaagcatacgctgaaagctacctcggcgaaacagtttcaaaagccgttatcacggttcctgcatacttcaacgatgcagagcgccaagcgacaaaagatgccggtaaaatcgccggtcttgaagtagagcgtattatcaacgaaccgactgcagcagcgcttgcatacggacttgataaaacggacgaagaccaaacgattcttgtttacgaccttggcggcggtacgtttgacgtatctgttcttgaacttggcgacggcgtgtttgaagtccgttcaactgccggtgacaaccgtcttggcggggacgactttgaccaagtcatcatcgatcatctcgtagcagaattcaaaaaagaaaacggcattgatctttcaaaagacaaaatggcgcttcagcgtttgaaagatgcggctgagaaagcgaaaaaagatctttccggcgtatcatctacacaaatttctttaccgtttatcacagcgggagaagcaggtcctcttcaccttgagctgacactgacccgcgctaaattcgaagagctttccgctcaccttgttgagcgcacaatggctcctgtccgtcaggctcttcaagatgcggatctttctgcgagcgaaatcgacaaagttatccttgtcggcggatcaacacgtattcctgccgtacaggaagcaatcaaaaaagaaacgggtaaagaagcgcataaaggcgtaaaccctgatgaagttgtagcgctgggtgcagcgattcaaggcggcgtcatcacgggagacgtaaaagacgttgttcttcttgacgttacaccgctttctctcggtattgaaacaatgggcggcgtgttcacgaaactgatcgaccgcaacacgacaattccgacgagcaagtctcaagtattctcaactgcagctgacaaccaaacggctgttgacattcacgtgcttcaaggtgagcgcccgatgtctgcggacaacaaaacgctcggccgcttccagcttactgatatcccgcctgcaccgcgcggcgtaccgcaaatcgaagtttctttcgatattgacaaaaacggtatcgtaaacgtaagagcgaaagacttaggcacaggaaaagaacaaaacattacaatcaaatcttcttcaggtctttctgatgatgagatcgaacgcatggtaaaagaagcggaagaaaacgctgacgctgatgcgaagagaaaagaagaaatcgaagtccgcaacgaagctgaccagcttgtgttccaaacggaaaagacattaaaagatctggaaggcaaagtggacgaagagcaagtgaaaaaagcaaacgacgcgaaagacgcgctgaaagccgctatcgagaaaaacgaaattgaagacatcaaagcgaaaaaagatgagcttcaaacaatcgttcaagagctttctatgaagctttatgaagaagcggcaaaagcgcagcaggctgaaggcgcagcaaacgctgaaggcaaaaaagcggacgacaacgttgtcgatgcggaatacgaagaagtaaaagacgacgaaacgaaaaaataagttctttcccgcatggctttaggcggaagaacacacagcatattctgattcaacagacagaaagtcaaagtcaggcatctcttggctttgactttttttcttgcccgggataaaaggaattgaaaaaacataattcaaaatgatacaatctaatttatgtgagaaattcgggagagtgaagcgagatgagtaagcgtgattactatgaagtgcttggggtaagtaagagcgcttcaaaggatgaaatcaaaaaagcctatcggaagctttcaaaaaaatatcatcctgatatcaataaagaatccggagcagatgaaaaattcaaagaggtaaaagaagcgtacgaagcgctctcagacgaccaaaaacgcgctcaatatgaccaattcggccatacagaccctaaccagggattcggcggcggtttcggaggcggcggagacttcggcggcttcggtttcgatgacatattctcaagcatcttcggaggcggcacgagacgccgtgacccgaatgcgccgcggcaaggcgcggatctgcagtatacaatgaccctgtcatttgaagacgcggctttcggaaaagaaacgatcattgaaattccgcgcgaagagaattgcgaaacatgtaaaggatcgggcgcaaagccgggaacaaagccggatacgtgctcgcactgcggaggttcaggccagctgaacgtcgaacagaacacgccgtttggcaaagtggttaaccgaagagtctgccaccactgtgaaggaacaggaaaaatcatcaaaaacaagtgttctgactgcggcggcacgggcaaagtgaaaaaacggaaaaaaatcaatgtcacgattcctgccggtgtggatgacggacagcagctgcgcgttccgggtcaaggtgaacctggcgtaaacggagggcctgcgggagatctgtttgtcgtattccatgtgcgcgcccacgagttctttgaacgcgacggagacgatatttattgcgaaatgccgttaacgtttgcccaagcggcactcggagacgaagtggaagtgccgacgcttcacggaaaagtgaaattgaaaatacctgccggcacacaaaccggcacgaaattcagattaagaggcaaaggcgttcagaacgtccggggctacggacaaggcgaccagcacattgtcgtccgcgtcgtcacaccgacgaatctgacagacaaacaaaaagacatcatccgcgagttcgctgaagtcagcggaaacctgccggatgaacaagaaatgagtttctttgacaaagtaaaacgcgcatttaaaggcgagtaatgattggataggagttggtagttttgaaatggtccgaaatcagcattcacacaacacatgaagcggtcgaacccatctcaaatattttgcatgaagctggtgcgagcggggttgtcatcgaagatccgcttgatttaatgaaagagcgtgagaatgtttacggggaaatctaccagctcgaccccaatgattaccccgatgagggtgtcattgtcaaagcgtatctgccgattaacagtttcctcggcgaaacggtggacggcattaaagagacgataaataatctgcttttgtacgacattgatttaggcagaaacacaatcaccatttctgaagttaatgaagaagaatgggcgacagcttggaaaaagtattatcatccggtgaaaatttctgaaaaattcacgatcgtacccacatgggaaacgtacacacccgtgaataccgatgaactgattatcgaaatggatccgggcatggcattcggaacgggaacgcatccgacaaccgttctgtgcattcaggcgcttgagcgtatcgttcaaaaaggcgaccgtgtcattgatgtcggcaccggttcaggaattttaagcatcgcggccgccatgcttgaggccgaatcggttcatgcgtatgaccttgatccggtcgctgttgaaagcgcgcgtctgaatctaaaattgaacaaagtgagtgatacggccgaagtgaagcagaacaatttgttagacggcatcacgggcgaacatgatgtcattgtcgcaaatattctggcggaagtgattctccgctttacatcacaggcgtatgacctgctcaaagacggaggccattttattacttcaggcattatcggccagaaaaaacaggaagtaaaagaagcgttggaaaaagccggctttaccatcacagaaattctgtctatggaagattgggtcagcatcatcgcgaaaaaataacagttagtaggtgtcacagcgtatgcaacgatattttatcgagctcacgaagcaggagatggacgaaactcccgattttcaaattacgggggaagacgtccaccatatagcgaacgtcatgagaatgagtgcgggagaccggataatctgctgttcgaaagacggccatgaagcgttatgcctgctcaaagcggtttctaaagatcatatatcatgcagcattgctgaatggacgggtgaaaaccgtgaactgccgttaaaaatcaggattgccagcggccttccgaaaggcgataagcttgaatggattatccaaaaagggaccgagctgggggctagtatgttcatcccctttcagggcgccagatccgtcgttaagctagacgacaaaaaggcaaagaaaaagcgggagagatgggcgaaaatcgcgaaggaagcggcggagcaatcgtaccgcaatgaaattcccgaagtgaaaaccgttcatacgttccggcagctgcttgaaatggcggagaatgtcgataaatgtgtcgttgcatacgaggagtcatcaaagcagggagaaacgggcgctttcgccgcggagcttaaaagccttccgcaaggttcgtctcttttaatcgtattcggccctgaaggcggtctgactgagtctgaagttcatcagctttcagaaaaaggcgccgtcttatgcggcctcggaccgagaattttacggactgaaactgcgcctctttacgcgttaagcgcagtttcctatcatacagagttattaagaggtgatcagtaatggcaactgttgcttttcatacccttggctgcaaggtcaatcattatgaaacagaagcaatctggcagctgtttaaagatgcgggttatgaacgaaaagaattcgaacagacagcagatgtatatgtcattaatacatgtacggtaacaaacacgggagataaaaaaagccgtcaagtcatcagacgggcgatccgccaaaatcctgacggcgtcatctgcgtaacagggtgctatgcgcaaacctctccggcagaaattatggccatcccgggtgttgacatcgtcgtcggcacgcaggatcgtgaaaaaatgctcggttacattgagcagtacagggaagagcgtcagccgatcaacggcgtcggcaatattatgaaagcacgcgtgtttgaagagctggatgttcccgcttttactgaccgcacaagagcgtcgttaaaaatccaagagggctgcaacaacttctgtacgttctgcattatcccttgggcgcgcggcctgcttcgttcccgcgatccggaagaagtcattaaacaggcgcagcagctggtggatgccggctataaagaaatcgtcctgacggggattcatacgggcggctacggcgaagatatgaaagattataatttcgccaagcttctccgcgagcttgatacacgtgtagaaggactgaagcggatcagaatttcatctattgaagcaagtcaaatcactgatgaagtgattgaagtgctggatgcgtctgataaaatcgtccgccaccttcatatcccgattcagtcaggatcaaacaccgttctgaaacggatgagacgcaaatatacgatggaatttttcgcggaccgtttaaataagctgaaagaagcgctgccgggtcttgccgtcacatctgatgtcatcgtcggtttcccgggtgaaacggaagaagaatttatggaaacataccggttcattaaagaacataagttttcagagcttcacgtattcccttacagcaaacgcaccggaacacctgcggccagaatggaagaccaggttgacgaaaacgtgaaaaacgaacgggtgcataagctgattgcgctgtctgaccagcttgccaaagaatacgcctccgattatgaaggagaggttctggaaatcattccggaagaggcgtttaaagagtctgatgaggacggcatgttcgtcggctatacggacaattacatgaaagtcgtcttcaaaggcacggaagatgtaatcggcaaacttgtcaaagtcaaaattcaaaaagcgggctatccgtataacgaaggacaattcgtccgcgtcgttgaggatgaaatgacccgaaacatgcgcatgtcttcataacagataaaaaaaccggtgccttcccgcatcggtttttttacggtttcggaggaatcagcctgtcaatcagccggtaaaacaaatgtgtgaacggcagaaacaataaggcggtgactacgttaaataacaggctgaaatgcgcaatcatctgcgcgggatcatcagacaggcgctccgtaatacctgctgatgcagacaggaagggaaagacgagcagcacgccgagaatattaaacactacgtgagcaccggcggtctgtctggcggcataaccgcctgaaacagcagccatgacggccgtgacgcatgtcccgatattagatcccagaacgacgctgaccgcttgttcaatgccgatcaccccttcgttcataaaactcatcaaaatgccgatgcagacggagcttgaatgaatgattgccgtcaatatcatgccgataaaaagagcggaccagctcgaatcattcacatggcgcaaaacctccgcccccgccttcatttctgtcagcggaacggcaagccggctgaagcatgtgatgcaaaaaaagatgatgccgagaccgaggaagcttataccgatctgcctgaacggatatttacggatgaggataaacacaaggcctccgataaaaagcacccaaatgagcacatccatctttatggctaaaaactccgtcgtaaacgtggagccgacattcgtgccgagaatcatcggaatggtccgtttaaaagataaagcgcctgcgctgacaaagccgatgacaatgaccatgaaggctgagctgctctgaagaaaaccggtgaatacgatgcttatgagaaaagctttcaaagggtggtcggtaaataagagcaggcttttctcaatttttgaatacgttaatgcgatcaggccctgcctgagcaggctcattccgagtaaaaaaaccaggataagtgcggtaaagagaatcagtattatcaaacgaaacacccctttccatcattatatagacaagcagccttattcatgacggaaaagtgagctcgcttagttgacctgactgatggcttatattataatgtcaaagtacatgtttatatatgtatctttttaaaggtagtcgattggtgtattcggagggagggaaagagaatgtcaaaaacggtcgttagaaaaaacgaatcgcttgaagatgctcttcgtcgcttcaaacgcagtgtatcaaagacaggtactttgcaagaagcaagaaagcgcgaattttatgaaaaacctagcgtaaagcgcaagaaaaagtcagaagctgctagaaaacgcaaattctaaaagagggtggatttatgagtcttcttgagcgacttaaccaagatatgaagctgtatatgaaaagccgtgagaaagacaaactgactgtcgttcgaatggtgaaagcttcacttcaaaacgaagcaattaagcttaagaaagacagtttgaccgaggatgaggaacttactgtcctatctcgtgaacttaagcaacgtaaagactccctccatgaattttcaaacgctgatcgtttagatttagtagataaagttcaaaaagagctggacattttagaaatttatttaccgaagcagctttctgaagaagagctgcagacaattgtaaatgaaaccatcgctgaagtcggtgcgagctccaaagcggacatgggcaaagtgatgagtgctattatgcctaaagtaaaaggtaaagctgacggcagtgtaattaacagacttgtcagcagtcaattatcttaattgacaagaaaaaagacatctttcctagagagatgtctttttttatacataaaaaaatgaaactaaagtacatttgttacgtatataaagaagaacgaaacgggaaggagggtatatttgccttgttccgaaaaaaaaacggaattgctgttgctctattgggcttatttgtattatctttattaggggttcaattgaacgcgaaagctgatcacccatcggtttatgtcatcccggttgagaaaaatgtcgaacaggggctcgcctcgtttttatcgcgttctttcaaagaagcgaaggagtccggcgcgtcacacattattcttgacatcaatacaccgggaggcgccgttcaatcagccttggatattgcggatatcatcggccgcgcggatgtgcctgttaccgcttacgttaataaacgggcgctttctgccggagcgtatatagcgcttcaggcagatgaaatctatatggcgccgggcggaaaaatgggtgccgcagccatcatcgacggaaaaggaaacgcggcggacaaaaaggctcaatcactgtggcatgcagaaatggaggacgcagcggttaaaaacaaccgaaatccgaaatacgccctggccatggcagatcccgccatcaatgcaaaggaagcgggcgccccaaagggaaaactgctgacactgacagctgaaaaagccaaggaagtcggatattcggagggcacggtttcagaccttgatgctttatatacaaagctcggttttgacaaagcggatgttcaccatgcaaaagaaggttttgtcggcaaattgggcagatggctgacaaatccgtttgttgtccccgtcttattaacgcttgctttgcttggtttgaccattgaattgttctcgccgggcctcggaataccgggtgccgtcggactgacggccatgctgctgtttttcaccgggcatatcgctgccggattcgccggctatgacagcgtattcttattttgcgcgggcttggtttttatccttttagagatatttctgcccggaggcataatcggtcttatcggtattgcaggcgtcatcgcgagcctctttctcgctgcgggcagctttaccgtaatggcggtttctctcttgatcgccattgctgtgtctattacagcctttatcatattaacaagggtgttggggaaacgaatgaaattctttaaaaaattaatattaactgattcaacaagcacggagagcggttatgtttcaaatcagaaccggacggagctgttggggaaagtcggcattaccgctacagccctcagaccgtcaggcaccgtcattattgatgatgaacgtctggatgtcgtctcggaaggatcattcactgaaaaagacagacaggtgaaagtagtgaaagcggaaggctcacgcattgtcgtgagagaaatatagatgataaccttgaggaggaattagatggaactgtcaagtttggcgattttagcaatagttgcagctgccataatcgtgttagccatattcttcacctttgtaccggtgatgctatggatttcggcgcttgcggcaggagtcagaatcagcattttcactttggtcggaatgaggctgcggcgcgtcataccaagccgcgttgtcaatccgttaattaaagcgcacaaagccggcctatccgcaacaacaaatcagctcgaaagccattatctggccggtggtaatgttgacagggtggtcaatgccctgattgcggcacagcgcgccaatattgagctgacatttgaacgctgcgcagccattgacctggccgggcgtgacgtattggaagccgtgcagatgagcgtcaatccgaaggtcattgaaacaccgtttatcgcgggtgtcgccatggacggaattgaagtaaaagcaaaagccagaatcaccgtaagagccaatatcgagcgccttgtcggaggagcgggagaagagacggttgtcgcccgtgtcggagaagggattgtctcgacaatcggttcctcgggtaatcataaaaaagtgcttgaaaaccctgatatgatttcgcagaccgtacttggcaaagggctggattcaggcaccgcctttgaaattctttcgattgacatcgccgacgttgatatcggcaaaaacatcggagcgattcttcaaacggatcaagcagaagcagacaaaaacattgcgcaggccaaagccgaagagcgccgcgccatggcggtcgcccaagagcaggaaatgcgcgctcgcgtagaagaaatgcgtgcaaaagtcgtggaagcagaagccgaagtgccgcttgcgatggcagaagcgctgcgtgaaggaaacatcggcgtcatggactatatgaacataaaaaatatcgacgcggatacggacatgagggattctatcggcaagctgacgaatgaccagcaagatgaagaccaacaataacctctctattaaggagggagccgctatatgcacgagattctgacaaatccgctcgtcattgccgccgtcatcggcattatatcggcaatattcggcaagaaaaacaaagatgaaaaacggccgccgggtacacgccccgaaaatcagacaaaaaagcaggatcaaaaacagccgcagaaagagcataagccggaagcggaagaattgcctgccgtttcagaagagaacccttttgagcaaaaaagaagggaagctgaaaagcgcctagcggagacggagcagatgtttaacgggcttgaacataagctgacatctcaacgcgcacgaaacgcgtctctgaagaaatcagccctcaaaataaataaagaaactgcggttcaaggcattatattcagtgaggttttgggtccgccccgtgcaaaaaaaccgcaccggaccatgcggagcatcggtaaaaaataaagtgttagaaccccttttcaaatcatacatatgagatgaaagggggttctttttttatggggcaaagaaagaatcgtgtaaaggcatggctgacaagagcattggaaattcccccggacgttatgatggatctgcctcggattacgatggtcggcagacttcatatctacatagagaatcacagaggcctcctgctgttcagcgaagaagaagtcaggctgatgctcaagcaggggcaatgtatcatatcaggaaaaaacttggtcattaaggcaatccttcctgaagaaattcttttggaaggcacgatagatcacgtacgatatgtcgattcataaagccggggggaaataatgtgaaaaacaaatggctgtcatttttttcgggtaaagtccaaatggaagtcaaaggaaaagggattgaacggttgctgaatgaatgcacgagaaacggaatcgccatctttgcggtgaaaaaaaagcaagactgtgttctgctgatgattcagcttcaagatgtacatgctttcagaagagtcatcagaaaacatgaatgcaaagcaagctttacaaaaagaaagggtcttccctttctgcttctcaaatcaaaattaaacctgggcttcactgcgggatttgtgatgtttttcgttatattgtttcttttgtccaacatgatttgggacattgatattaaaggggccaagcccgaaaccgagcatcagatggtaaagcaccttgaagaaatcggtgtgaaaaaaggacgtttgcaatttttaatgatgacgccggagaaaattcaaaaatcattaacaaacggcattgataatattacgtgggtcggtgtggaattgaacgggacagcccttcatatgaaagtggtcgaaaaaaacgaaccgacaaaagaaaagtacgtgagcccccgccatatcgttgccaaaaagaaggcggtcatcaaaaggatgttcgtgcaaaaggggcagccgatggcttttgtgaacgatcatgttgacaaaggacagcttctcgtctcaggactgatcggaaatgaagatcggaaagtcgcctcaaaagcggaaatttacggagaaacatggtacaagtcagaagtaaccgtgcctcttgaaacatcatttacgctatatacgggtaaagtaaggacgaagcacaagctgtctttcggatcatggggcgtgcctttttggggctttgaatttaatgaggagccgctgaaacatccgaaaacagaggaagaaaagcacccgtttcaatttctggggatgaagcttccgatttcttacgttcaagaacagacaagagaaagtgaaacaaccgtgcggacttatacgaaaggcgaagcggttcaggccggtatcaaaatgggaagacaagatgtagaaaagcgattaaacggcagcggagaggtggaaagtgaaaaagttttgcaccaatccgttgagaatggtaaagtaaagttgattattctctaccaagttatagaagatatcgttcaaaccacacctattgttcagggagactaaagaatggcagaacatttacttgcgattaatcacaaactgaaaagcccggacgaagcactttctttgttcggcagccaagatgcctttttacatttaatggagaaggatctgggcattagcctcatcacgcgcggtgaaaccatttacgtttccgggaatgatgaaacatttgagatcgctgacagattattgggctcgctccttactttaattcgcaaggggatcgagatttcggaacgtgatgtgctgtatgccgtgaaaatggcaaaaaaagatgaactggactattttgaaagcatgtatgaagaggaaataacgaaaacggcaaaaggcaaaccgatccgtgtcaaaaccctcggccaaagagaatatgtggcggcgatgaagaaaaacgacatggtgttcggcatcgggccggcgggaaccggcaaaacttatttggcggtcgtaaaagcggtgcatgctttaaaaaacggccacattaaaaaaatcattttaacaagacccgctgtggaagccggcgagagcctcggctttctgcccggagatttaaaggaaaaagtagatccttatctgcgcccgctgtatgacgcgctccatgatgtgctcggaagcgaccatacggagcgtcttatggaaagaggggttattgaaatcgccccgcttgcctatatgagagggcggacgcttgacgacgcgtatgtgattcttgatgaagcccagaataccactcccgctcaaatgaaaatgtttttgacgagattgggttttggctctaaaatgatcattacgggcgacgtaagccaaattgacctgccgaaaggcgtcacatcgggacttgcagtagcgaaggatatgctgaaggacataaacggcatctccgtgattgaacttgaccagacagatgtggtcaggcatccgcttgttgcaaaaattattgaagcttatgataagcaaaagtaatgcaaaaatgacccgatctcccgttatcgggtcatttttatatgatgtgttcctgatgtttcagggaggaggttcttgttttgaaaaagaaggaaaagggcaaaagcgcccgggaacggttccgcagtttcagacatgcccgctcagcccatgtgctgctgtacctgctgctttcagcgatcatgtttggtttgctctttattcatgtaaaacctgaatcacttaatttggatttgttttcagtcagtgataagacgatttacgcgcccgccacagtggaagatcagcaggcgacggaatcgaaaaaacaggcggccgaagatgcggtggaagatcaatacaccctgaaaaaaggctataccgacaaccggcttgacctgatcacttccatttttgacagcatcggcgaagtgaaaaaagatgcggaaaaagacaaaaagtcaccttcggaaaaatcattggtcaaatcggtgaaaaacaagctgacacaggatgtcaatgaatccgtctcggaagatgccattaaatcgcttctccatgcaaacaatgaagatttctcatttgtgagggattccgtcattaccgcggtgaatacggtgatgagcagtgaaattccttctgaaaagcttgccgaagcgaaggataaggtcgcaaaagagctgaaaagcgcttctgtgccgtcaaaatatttagcggctgcgactgaaatcggaaaatacgcggtcattccgaattacgtatttgatccgaaagcgacggatgaaaaacgccaggaagcgtcagacagcgtccagccggtacagatcaaacagggacaggttctcgtggaagagaatgacctgatcgaccgggaagtatacaggaagcttgaactgacggggcttttgaataattccaacctgttaaagccgatcagcggtctgcttctgatgatcgggctgtttatcgccacgcttgtctactattttgagaaacagcagcaggagcttaagctgaaaaataaatctcttttgctgttttctatcattacaacgcttattctcgtcattatggaagtcgtcagtctctttcagaagattgaatacaccaatatcggctatcttgtgccgatcgccgccggcgcgattttaatcaggctgctgctcaatgaaaggctcgccattttgggaagcatcattctggcgatctgcggcagtatgatgtttaatcagggtgtgacgggaacatttaattacgtcatcggcatttactatttaatcagcagcatttcaggcattctgtttttggggaaacacaatgcgagatcaaaaatattgcaggcgggactgttcgtctcatttattaatatgattatcgtgctgtcgcttttattaatacaaaatacggcgctgtcacctgttgaaatcggaacgctgatgctgatgggggtcgtctcgggacttgcttcatccgttttgattatcggtctgatgccgttttttgagacgggattcggcattctttcaacgatgaggctgattgaactgtctaatccgaatcatcccctgcttcgaaagattttaacggaaacacccggtacatatcatcacagcgtcatggtggcaaatctgtcggaagcggcttgtgaagccgtaggggcaaacggtcttttagcacgggtcggagcatattatcacgatctcggcaaaacgaaacgtccgcaatattttattgaaaatcagatgaatatggataatccgcatgacaagctgtctcctcagctcagtaaaaatatcattatcgcacatacgacagacggtgcgaatatgctcagaagctataagtttccgaaagagcttgtggatatcgcggagcagcatcacggaacgtcccttttaaaattcttttattataaagcgaaagaaaagggcgaccagattacagagaaagagttccgctacccggggccgaagccgcaatcgaaagaagcggctattatctcagtggccgacagcgttgaagccgccgtccgttccatgcataatcccaatcccgagcggatcgaaaaactggtgcggggaattatatccgataagcttcaggacggacaattctcagaatgtgatctcacgttccgagaactggatacgatcgccaaaacactatgtgcgactttaaaaggaattttccactcccggattgaatatccggaggctacgaagaaggtgaaataaatgggtttactcatagatattgttgatgaaacgaacagcgtctcagctgatgcgctccaagaagtggagaagctgctccaattcgcggcggaaaaagaaggcgttcaggatcaggctgaagtatcggtcacgattgtgacaaatgaagaaatcagagaaatcaacagagactaccggggaaaagacactccgactgacgtcatttcgtttgcgcttgaagaagaaggcgaagacgaggtggaaatcgtaggcgccgacatgccgcctgttttaggagatattatcatcagcgcagacagaacgaaagagcaggcggaagagtacggccattcgtttatgagagagctcggttttctggccgtgcacggctttttgcatttgcttggctatgatcacatgacaaaagaagaagaggaagaaatgttttcaaagcaaaaggatttgctggatgagtatggactcacgagatcataaaaacgagtggagcaggttcctgaagagctttgtccatgcatggaggggaatctggaaaacggcgcggtcagagcggaattttcaatttcatattaccgcggcctgcgccgttatcgtttgcggttttctcaccgggctgagcacagccgaatgggccgttgttttggtgctgatcggagggatgcttgctttggagcttttaaatacggcgatagagcatgttgtggatttagttactgatcagtatcacccgctcgcaaaagcggcaaaggacgcggccgccggagccgtttgcgtctttgccgtgatatcgtgtatcattggtttactcatcttcctgccgaagatatgttagcagaagattcttacaattattttacattgccaaaaatgggcgtgaaaaaccgatcataattatgtaaaataaaagtgacagcggtatcatacaggataaaggtaagagaggaattaagtacacatgaacagacaagaattgattgcagaagcattaaaagcacgggacacagcgtatgtgccgtattcaaatttcagagtgggagccgctcttcttaccaaagacggaaaagtgtacagaggctgcaacattgaaaatgcggcatacagcatgtgcaactgtgctgaacgcacggcgatattcaaagctgtttccgagggggatacggaatttgcgatgctcgccgtggctgcggatactccgggaccggtttcgccgtgcggagcctgcagacaagtaatttccgagctgtgctcaaaggatatgcttgttattctgaccaacttacaaggacaaataaaagaaatgactgcggaagaattattgccgggcgcattttcatcggaggatttacatgacgaacgaaagctttaaatcaggatttgtatctatcatcggaagaccgaacgtaggaaagtctacctttttaaacagggtcatcggtcaaaagatcgccatcatgagcgacaaaccccagacgacaagaaataaagtccaaggggtgctgacaaccggcacgtcgcagactatttttattgatacaccgggcattcacaaaccgaagcacaagcttggcgactttatgatgaaagtggcgcagaatacgctgaaagaagttgacttggtgttatttatgatcaacgccgaagaagggtacggaaagggcgacgagtttatcattgaaaagctcggacagacgtccacgccggtctttctgatcgtaaacaaaattgataagatccaccctgaccagctgcttcttttaattgatgagtaccgtgcgcgctatccgtttaaagaaatcgtgccgatctcagctttggaagggaacaacgtcgaaacccttctcgcgcaggttgaagcgtatttaccggaagggcctcaattctatccgagcgatcaggtgactgaccatcccgagcggttcattatttctgaactgatcagggaaaaggtgctccatctgacaagggaagaagtgccgcacagcatcgctgtcgctatcgagtccattaaagggcaggaaaacggctccgtccatgtcgccgccaccattgtagttgagcgggattctcaaaaaggcatcgtcatcgggaaaaaaggagcgcttctgaaagaagtcggcaaaagagcgcgggctgatattgaagcgctgctgggttcacgcgtttacctcgaattatgggtgaaagtgcagaaggactggcggaataaaatgtctcagctgcgtgatttcggcttcaaagaggatgaatattaattcatctaaagcgcatgcctgatgtgtgggattacctcacagaaacagggcttcgttagcaaaatttgtttaacatgaaaaggaggacatcaggtcaagataagggtaagaatttggattggcaagctagtttaatgatgaaaggtgggttttttgtgttgaattttacctggaacgtattttctcaaacaggaagtgttgatacgtaccttctttttaaagaactggaaaaagagaacctggaaagacccgaagaaccggaagatgagctagcccgaattgattttccaattttgtaaacctcttggcccctcccgttgttggaaggtgcggaaatgctgactaaatgtgaaggaatcgtgctccgtacgaatgactacggggagacgaataaaatcgtgacattgctgacgagggaacacggcaaaatcggcgtcatggcaaggggcgccaggaagtcagccagccggctgtcagcagtcagccagccgtttttgtacgggtcatttttaatgcaaagaacatccggactcggcacgctccagcagggtgaaatgattctcagcatgagaacgatcagagaagatttatttttgacggcgtatgccgcttttatcgctgaactcactgacaaaggaacggaagagaagaaaccgaacccctatttattcgaattgattctcgaatcctttaagaggctgaatgacgggactgacccggacgtgatcacattcatcgtgcagatgaaaatgctcggcgtcatggggctgtatccggagctgaatcattgtgtccactgcaaaagcggggaagggacgtttcatttttcgataagagataacggttttatctgccaccgctgctttgaaaaggatccgtacagagttccgatttcgccgcaaacggcaaggctgctaaggcttttttattactttgatatcggaaggctcggcagcgtctcgttaaaacaggaaaccaaaaacgaaattaaacaggtcattgatctgtattacgaggaatattcaggactttatttaaagtcaaaacggtttttagaccagatggaaagcatgaagaaccttttggatgaaaacaaaagttgacattctgcccatctttttatatgatcatttattataaaatatgttgcagtgacagaaagaagtacttgcgtccaactcatacaagcgaccttaggacagtgtaagctaaggatgagcgcgcaacgaaaggcattctcgagcaaccctttaaaaagaggctgagtgattcacatcctcagcaactagggtggaaccgcgggagaactctcgtccctatgtttgcggccggcaagcatagagacgggagttttttggttgccgccgcacttgtaaaagaatggagaaagtggaggtgcttgaaatgaacattcaagatatgattttaaccttgcagaagcactggtcgaatgaaggctgtgtgctcatgcagtcgtatgatgtggagaaaggcgcaggcacaatgagcccgtatacatttttacgaagcatcgggccggagccgtggagagtggcttacgttgagccgtccagacggcctgcggacggacggtacggtgaaaacccgaacaggctctatcagcatcaccaattccaagtcattattaagccgtcgcctgataacattcaagagctttaccttgattcattgcgtgcgctcggcattgacccgcttgaacatgatatccgtttcgtagaagacaactgggaaaacccgtctttaggctgtgcaggtctcggctgggaagtatggcttgacgggatggaaattactcagtttacatatttccagcaggtgggcggaattgaatgtaagccggtgtccgttgagatcacatatggtattgaacgtctcgcgtcatatattcaggataaagaaaacgtctttgatcttgaatggacgtcaggatttactgtgaaagatttatttatgatggctgaatatgagcattccgtttatacttttgaaacatctgacgtggatatgcttttccatttgttcagcacctatgaaaaagaagcgatcagacaaatggataacgggcttgtgcatccggcctatgattatgtgctgaaatgctctcacacatttaatctgcttgatgcaaaaggcgcgatctcggtgacagagcggacgggttatatcggccgtgtccgcaacttagcgagaaaagtggcaaaaacgtattatgaagaacgggaaaaattagggttcccaatgcttaaagaggagggctcttcccatgagtaaacaagacttgcttttagagatcggactcgaggaaatgccggcgcggtttttacatgacagcatggtgcagctcggtgaaaagctgaccggctggcttgctgaaaaaaatatcgcccacggcgaagtgaaactttttaatacgccgagacgtctggcagtatatataaaagacgtagcagaaaaacaggctgatattcaggaagaagcaaaaggccctgcgaaaaaaatcgctctggatgctgacggaaactggacaaaagccgctatcggattttcaaaaggccaaggcgccggagtggatgacctgtatataaaagatgtaaacggcacggaatatgtcttcgttcaaaaattccaggcgggacaagagacgaagacacttttaccgcaactggaaaatttgattgccggaatgcattttccgaaaaacatgcgctggggcacgcaggatctgcgctatatccgtccgatcaaatggattgccgccctctttggaaaagacgtcattccgtttgaaatcacaaatgtcaagacgggccggaacacgcagggacaccgctttctcggccaagaagtatctgttgatgcgccgtcatcatacgaaaagctgctgaaagaacaaagcgtcattgctgacccgaaagaacgcaaacaaatgatccaaagccagctggatgcgcttgcggccaagaagaaatggaacattccggtcgatgaggatctgctgaacgaagtcaaccatctggtggaatatccgacggcgctttacggatcttttgaatccgagtttctttctatccctgaagaagtgcttgtgacaacaatgaaagagcatcagcgctacttcccggtaaaagatgaaaacgggaatttgcttcctcattttattacggtgcgaaacgggaacagccatgcaattgaaaatgttgcccgcggaaacgagaaagtgctgagagcaaggctttcagatgctgcgttcttctacaaagaagaccaaaagctgaacattgatgaaaacgtgaagaaattggaaaatatcgttttccatgaagagctcggctcccttggagataaagtaagaagagcggtcaccattgcgggcaaacttgccgtccgcctgaaagcggatgaacagacgcaaaaacttgtgaagcgcgccgcagagatttctaaatttgacctggttacacatatgatctatgagttccctgagcttcaaggcgtgatgggagaaaaatatgcgcgcatgctcggtgaagatgatgccgtcgctgccgctgtcaatgagcactatatgccgagagcggccgggggagaagtgccttcaacctttatcggcgcggtcgtggcgttagctgataaactggacacgattgcttccttcttcagcattgacgtaattccgacaggttctcaggatccgtacggattgcgccgtcaggcaagcggcattgtttccattctgatcgaccgcaactggggcatttcttttaaagaactgctgtcgttgacagaaacggaaaaagagaatgagctccttgatttctttacacagcgtctgaaatacgtattaaacgctgaagacatccgtcatgacgttattgatgccgttctggacagcacagagcttgagccgtatgcagccgttcataaggcaagagtgcttgagaagcacctcggcacacccggctttaaagaaacggctgaatcactcggccgggttatctccatcagtaaaaaaggcgagagccgcgatatcaagccggatctgtttgaaaatgaacaggagaaaaagctgtttgacgcttatgaaaaaacaaaagacagtgtcgcggaaagctttgcctccaaaaactatgaacaggcgcttgccgtgctcagcggattaaaagagccgatcgaagattactttaatcacacgatggtaaatgcggacgatgaagcattaaaaaccaaccgtttagcgcaaatgaccgctcttgcagatgtgatcaagtcttttgctaatatgaatcatcttattgtaaaataaagaaaaagacggttgctgtgtgatcggcaatcgtcttttccccttttacataaacatcacagaatgaaaacatagataaagaaacccttccataaaggtggtgagtacgatcgaattaaataaacggcaagaacaaattttacagattgtaaaggaaaacggcccgattaccggagagcatatcgcagaacagctcaatttaacgagggccacgctgcggccggacttggccatactcaccatgtcaggcttcttagaggcccgtccgcgggtcggttatttttatacggggaaaacgggaaatcagctgcttgcggataaattgaaaaagctgcaagtgaaagattttcaatcgatccctgttgtcatcaatgaaaatgtctcggtatacgatgccatctgcaccatgtttttagaagatgtcggcacgttatttgtcgtagatcgtgatgctgtcttagtcggtgtgctgtcacgcaaagatttgctgcgggcgagcatcggccagcaggaacttgcctcaataccggttcatattatcatgacaagaatgccgaatatcgccgtctgccggcgtgatgattatgtgatggacatcgccaagtatttaattgaaaaacagatcgatgccctgcccgttattaaagatacggataaaggctttgaggtcatcggccggtttaccaaaacgaatatgactaagatacttgtcagtttatcagaaaatgaaatcatataagcttgaaaactaacggggggataacatggacaatcgcatcatttatgtagtatcagactcagtcggagaaaccgccgaactcgttgtaaaagcctcgctcagccagtttaacggctcagccgatgatacgcatatcagaagaataccttatgtggaagatatcggcaccattaatgaagtcgtgtctctcgccaaagcggacggcggcattatttgttttacgctcgttgttcctgaaatgcgcaaatacctggttgaacaagcggaaaaagcgaatgtgctgtattacgatattatcggtccgctcatcgataaaatggaatcggcttacggtttgaccgccaaatatgaaccgggccgcgtccggcagcttgatgaagattatttcaaaaaggtcgaggcgatcgagtttgccgtcaaatatgacgatggcagggatccaagaggcattttaaaagccgatatcatcctgctcggagtatccagaacgtctaaaaccccattatcacaatatcttgcccataagcgtctgaaagtggccaatgtgccgatcgttcctgaggtcgacccgccggaagaactgttcagcgttgatccgaaaaaatgcatcggcttaaaaatcagccctgataaactgaaccatatacgtaaagaacggttaaaatctctcggcttaaatgacaaagccatttacgccaatatcaacagaattaaagaagagctggagtattttgagaaaatcgtggaccggatcggctgccaagtcgttgacgtttcgaataaagcagtcgaagaaacagcgaacatcattcatcatctcaaaacaaagggccgataactcaggacgctttatcctgggtttttgggtatgcaaatagggaataaacaaaaaggatggcatcttcgcgaagtttgtattataataaaaaattgtgataaaatgtttatttttaggtttaagcttcgtgtgatacgaataaactattatgggtaagatgtcaagaataactcccggaaatttttcgacaaagctcaaaatagatccgcagtcatggagcatatgcgatttcgcttgtttttatgcaggagattgatggagggatggagaattagtcttctaaatgaaaaagaaaagacgatttttgtcgatgcagacgcatgccccgtaaaagaggaaataatgctcattgcatcgcaattcagcgttcgggttattttcgtcgcatcatttgaacactaccagctttccagaagcaaagacgagaactgggtatacgttgatcctcataaagaagcggcagatttatatatcgcaaaccatgtgagatcgggagacgtcgtagtcacgcaggatatcggtttagcatctcttttgctgaacagaaatattgccgtcttatcggaaaggggccgttcttatactgaagacacgattgacttcgctctgatgagccgtcatatgtcaggcaaaatgagaagaagcggcattcattccaaaggacctaaaaaattaaataaagaagatcggaatcgatttgttaccctgcttaaaaaaatcctgtcgaatgatgaagggatttcaaatcaaaacatcgaataatgtacgacggagtgttataagatgggaaaccgcataccagatgaagtagttaatcaggtgcagcagtcagcagacattgttgaagtcataggtgattatgtccaattgaaaaagcaaggccgcaactactttgggctctgtccgtttcacggggaaaacacgccctcgttttccgtctccagcgataagcagatctttcattgcttcggatgcggagcgggcgggaacgttttctctttcttacggcagatggaaggctattcatttacggaagctgtttctcaccttgcggataaatatcagattgatttccctgatgatataacgattcactctgcatccaggcctgaatcttccggagagcagaagatggaggaagcccacgagcttctgaagaaattttaccatcatttgctaataaatacaaaggaaggccaggaagcgttagattaccttttatcaaggggttttacgaaagagctcatagatgagtttgaaatcggctacgcgctggattcctgggatttcatgacgaaattcttgaaaaagcgcggttttgaggaagaaatgatggaaaaagcgggtctgctgatcagaagagaagacggcagcgggtattttgaccgtttcagaaacagaattatgtttcccattcatgatcaccacggagccgtggcggctttttcaggaagggcgctcggaagccagcagccgaagtatatgaacagcccggaaacgccgctgtttcataaatctaagctgctgtataactttcataaggcgcgcctgccgatcaggaaagaggagagagccgttctgtttgaaggcttcgctgacgtcatatccgccgtcagctcaggcgtaaaagaaagtatcgccacaatggggacgtcgctcaccgaagagcatgtgaaaatcctcagaagaaatgttcaggaggtcattctctgctacgattcggataaagccgggtacgaagctacgctgaaagcggccggcctgctccagaaagccgattgtaaggtaagagtaagcatgctgcctgacgggcttgatcctgatgattatatcagaacccggggcggagaaaaattccggaccgatatcattgatgcaagcgttacggtcatggcttttaaaatgcaatatttccgcaaagggaaaaacttatctgacgaaggagaccggctcgcttatatgaaagaagtgctgaaagaaatcagcgctctttccgggtcgcttgagcaggaaatgtatgtgaagcagctcgcctcagaattttctctttcggtagaatctttgacggaacagctttccatctacgccagacaaaacgcccccggcgacaaaaacgccgaaccgcagacaagacgggcccgggtgacgactaaagcgaaacggcgccgtctccgtcccgcctatgagaacgcggaaagacttctgctcgctcatatgctgagagaccgaaacgtcatcaagaaagtgattgagcgtgtcggctttgaatttaacattgacggacatcgtgcgctggcagcatacctgtacgctgtttatgaagagggtgctgacatgacgccgcagcatcttatggcgagaatgcaggatgaggaaatcagccagctgctttcagatatagggatgctccaagtaaacgaggagctctcagaggccgagttatccgattacgtaaaaaaagtgttggatcaccgaaaatggtcaatgataaaggaaaaagaagcagaaagagcggatgcggagaggcagaaagacttcgtgaaagctgcgtctctggctcaagaaattgttgcattgaaccgatcattaaagtaacaacaaatagaggcttgcgttctgattggcaatgattccttgcggaggagcaaatagatcgcttaacctcatcatgaattgtcattattatccgcagccctgcatgctgaaaaagagagaaggcttccgggtcggataagaaacataccgcttttagaattcgttgcaagctttggaaggagggatccataatggctgataaacaaacccacgaaacagaaacagaacttacattagaccaggtaaaagagcagcttactgaaactggaaaaaaacgtggcgttttaacatatgaagaaattgctgaacgcatgtccagctttgaaattgaatcagaccaaatggatgagtattatgaatttttaggagaacaaggtgttgaattaattagtgaaaatgaagaaacggaagatcctaatattcaacagcttgccaaagccgaagaagaatttgaccttaatgacctcagcgtaccgcctggcgtaaagatcaatgatccagtccgcatgtaccttaaggaaatcggacgggtaaatcttctttctgctaaagaagaaatcacctacgctcaaaaaattgaagagggtgacgaggaatctaaacgcagactggctgaagcaaaccttcgtttagttgtcagcattgctaaacggtatgtcggccgcggcatgcttttcttagacttgatccaagaaggaaacatgggtctcatgaaagccgtcgagaagtttgactaccgtaaaggatataaattcagtacgtatgcgacttggtggatcagacaggcgattacacgcgccatcgctgaccaggcgagaacaatccgtatcccggttcacatggtggaaaccattaataaattaatccgggtgcagcgtcagcttcttcaggatcttggcagagagccgacaccggaagagattgctgaagacatggatcttacgcctgaaaaagtccgtgaaatattaaaaattgctcaagagccagtttctttagaaacaccgatcggtgaagaagacgactcacatctcggtgattttatcgaagaccaggaagcgacatctccgtcggatcatgcggcatatgagcttttaaaagaacagctggaagatgtgctggatacgttgacagatcgtgaagaaaacgtgctgcgtctccgtttcggtctggatgacggacgcacaagaactttggaagaagtcggcaaagtgtttggagtaacgagagagcgtattcgccaaattgaagcaaaagcgcttcgcaaattgagacatccgagcagaagcaagcgtctgaaggattttctcgaatagaatggaacgggtctttttgatccgttcttttttatgtataagatatatggataatatacctttattttactggataagcatatgttttgcaaatgagtttggaaaaaatgcggcatgtcctgaaaggggggaaatgagacaagtttatttatattctttattgtaagcgtatacaattcattatacaatagaataaagataattttgtggtaagcaaaacagttatttttgctttttgtataaattgtgaaatcattgaaattgctgagcaagaccatttactttttgtaaaaataagttagaattagaagtgtttacatagggggagaatgaaaaagggggatggagatatgaagtggaatccgctgattccttttttgctcattgcagtgctgggaatagggctgactttctttttagctgtaaaaggcaatggagatgcgcatcagatcgcaagcggcggtgaaagcaaaaatgccgagaaggaaactgcaaacgcttcacctgaagagatttataaagccaactgcatcacctgtcacggagaaaactatgaaggtgtgtcagggccgaacttaaaaggcgtcggcaaaagaaaagatgtcgctgagattaaaacaaaaattgaaaaaggcggcaacgggatgcccgcgggccttgtgccggccgaaaagctggatgacatggcaaaatgggtttctgacattaaataaagctttaccggtccctatataaaagacatatgaaaaactctatccgccgcttggattccgggcggtttttttatatgatagtaaaggaaaaagaacctgagaaaagttgtgatattgtgaatgaaatgaagttatcgaaaagattgcagtctgtggcggaatatatccctccgggtgccctggttgctgatatcgggtcagaccacgcgtatcttccttgctatgccgttttgaatcatttggcaagccgggcaatcgccggtgaaattacagacggaccgtttctatccgccaaacagcaggtggaaaaactgcacttaagcactcttatctccgtaaggaaaggtgacgggctgagcgtccttgaaaaaggagaagccggcgccattacgatcgctggcatgggcggagcgctgatcgctcatattttggagtcgggaaaaacgaaattgacagggcgtgaacggctgattctgcagccgaatattcatgccgttcatataagagagtggctgtatcaggaaggctatgaactgcttgatgaagtgattctcgaagaagacggaaagtgttatgaaatcctcgttgcggaaactggcgaccgtgatgcgccttatcgggatgtgccgatggctgtcggaatgcttgcgggtccgtttttgttaaaagagaggaatgaagtgtttcttcggaaatggagccaggaacttaagcatactgaacaaatttatgaacagatcagccgcagcgcaaagcatgaaaatcatgaaaaattagctgaattgaaagagcggatttctctgctgaaggaggtaatcggacatgcctaaacatgtgaacggacaggaaatcatccagctgtttgaacaattttcaccgaaggcttatgcggtggaaggagataaaatcggactgcagatcggtacattgaataagccggtgaaaaatgtcatggtgacactggatgttttggaacaaacggtagatgaagccattgagaaaaaagttgacttaattatcgcccaccatccgccgatttttcggccgcttaaacagatcaccactgatcagccgggcggaagactgattgagaaatgtataaagcatgatattgccgtatatgcggctcatacgaatcttgatgtagcggacggcggtgttaacgatctgcttgccgaagctctcggcctgacagacactgaagtgctcgtcccgacatattcggacccgatgaaaaaacttgccgtatatgttccgaaagactatgaagaagctgtaagaaccgcactcggcaacgccggagcgggacatatcggcaattacagccattgcgcgttctcttctgagggaatcgggagctttaagccgctggacggggcagacccgtttatcggacagacgggagagctggaactcgtccatgaagtgagacttgagaccgtttttccggcaagtatggagaaaaccgtcgtaaaagcgctgaaaaaaagccatccgtatgaagaggtggcatatgatatttatccggtggagcagtctccgcttgaaaaaggcctcggccggatcggaaaacttcagcaggacatgacgcttgaagagtttgctctgtttgtgaaagaaaagtttgacgttaacggagtccggatggtcggagagcgaaacagcaaggtgaaaaaggtcgcggttcttggcggcgacggaaataaatatatttatcaggcaaagcggaaaggtgcagatgtttacgtgacgggcgacctttattttcatgtagcgcatgatgcgatgatgatgggattaaacgtcgtggacccggggcattatgctgaaaagatcatgagaaaaggcacggctgagaagcttacggcaatggccggagagaaaaactatgacgtgcgcattttcgcttccgaaacagatacaaacccatttaccttcttataaaaaaactgaggccccgggcctcagttttttatttttactttcggaagaatttttttgagcggcacactgtgttcaagctgccatgtcgattcatcgttgtggtcaaactgctctaaaaagcggatgacttcctttgtaatcggtgtcggtgttgatgcgcctgcggtaacggcgacggtattgacgtctttcagccattcgagcttcagttcactgatgtctccgattcggtaggcttttgttccggcgatttcttctgacacttgagccagcctgttggagttattgcttttcggatcgccgacaacaatggttaagtccgctttttttgcctgctctgatacagcttcttgacgaacctgtgtggccaggcagatttcctgatggtattccacgtgcgggtacttttctttgactgattccataatatcgtggacgtcccactgggacattgtcgtttggtttgtaacgattaatttctcagcctgaatatcgagatttctgacgtcttcttctgtttcaacgagatgaacgatttcaggagcgacgccgacggctccttcaggctcggggtggccttttttgccgatgtatatgacatgatagccttcagcttttacttttcggattaagtcatgtgttttcgtgacgtccgggcatgtggcatcaatcgtaacaagccctttttcctcagcggcttttcttacttccggagataccccgtgagccgtgaaaataacggttcctttttccacctgctttaaaatctccagacggtttgtgccgtcaagcgtgtaaatgccgtcttcctcaaacgcatctgtgacatgcttattatgaacaatcattccgagtatatatataggtcttggcagtgttttatcgagtgacgcgtttttggctatgaccatggcatcaacaacgccgtaacagtagccgcgcggcgatattttgataacgtccaatgtagatgtcctcctatcaaaagtgagtgtagaggcaatataaaaagccgtagttaaacggctcaaatcttgcattcttctgatctcattatagctaatctttcgtgagatatcaaagaatgttaaatatataatttcggctttgatctgcccgatgttctttttggacgcggctgttccgctgagtctgcctgtgcggcgtctttttcttttgaagcggatgctttttcagacgtcttctttgatgtgttggatgaggcgtctgatttgttttcatcttctgtttcatctgttttttcagcttcatcctttttatcctgttcgtttgtttcttttgtctcgtcagattcattctcatcatcgctgctgcttaattggctgtaaagcttcatcatggcgggcagactccgtactaaaggaccgtactgctgaatcatcggtgtaacctgctgcgccacgccgagcaccttctgaacgttgccgagcatgctcgacagggatgccggacttgccaggttctgtattccctgcagtcctgcacctgctcctccgctggccgccgccggtgccgacgcggcagcgcttcctcctcctgaaccgggtaaaaaacgggaaagcatcccttttaagccccctccgccgcccgtgcctgcgtttctcaggcccgctccggcaatctgctgctgagggaaaagctgccggccctgctgcatcagctgccggcccggcaatgacggtcttcctcccatcatcatacgcggattcatcaacggccggccctgctgcgccatatttctcatcggctgctgtggaaacatacttgtacctcctttctgtctctctgctattacaatatgcatcggagggggcatttgcttttctgtctcgaaaacaggattcccccaagacatggtgtttttaagtaaaatcggttataatgtgatgatggacacagaatgtgccgctttaaggagctgggaaaaatgaaagaaactaaatttgatggatacaacttaaaaccgtttattatagatgcagttcaccgccttggtttttatgaaccgacagatattcaaaagcggctgatacccgccgtgctgaaaaacgaaagcgtgatcgggcagtcccagacggggacggggaaaacccacgcctatttattgccaattttgaatcggattgatccgggttctgatacggtgcaggctgttatcacggcgccgacgagagagcttgccaatcagattcatcaggaagcgctcaaaatcacacagggtgcggaagatgagccgatccggacaaaatgtttcatcggagggacggacaagcaaaaatcaattgataagctgaaaacacagcctcatctcgtcgtcggaacgccgggccggatcgcggatctgattaaggcgcaggcattgaacgtctataaagcgcagtctctcgtcattgacgaagcagatctgatgcttgacatgggctttttagaagatgttgattatatcggatcgcggatgccggaagaacttcagatgcttgtgttctcagctacgattccggaaaagctgaagccgtttttgaaaaagtatatggaaaatccgaagtacgcgcatgttgagccgaaaagaatcacagccgaaaagattgaacatgttttggttccttctaaacagcgtgataaagacaagctgctttttgatatgatgtctcatctgaatccttatctgggcattgtgtttgccaatacgaaaaacacggctgaccatattgcgaaatacctgactgaaaagggcatgaggatcggtcttctgcatgggggattaacgccgcgtgagcgtaagaaggtaatgaagcagattaatgatctggaattcacttatgtcattgcgacagaccttgcggcaagaggaattgacattaaaggcgtaagccatgtcatcaactatgagcttccggacgatctggatttttatgttcaccgcgtcgggagaaccgcacgcgccggttcatcaggccaagcactgaccatttatgagctttctgacgaagatgcgctcgtaagactcgaaaagatgggtattgtgtttgactatgcggagcttgtaaacggcgaatggaagaaaggcgatgaccgccaccgccgcaaaaaacgcaaaaaatcggagaatgaggccgaccaaatggcgaagcgcctcgtgaaaaaaccgaaaaaagtgaagccgggctataaaaagaaaatgagctacgaaatggaaaagataaaaagaaagcagagaagaaacaaatctaacaaaggaaagtaggggactcgggttgctgaaaataggttcacacgtctcaatgagcggaaaacatatgctccttgccgcaagcaaggaagctgtttcgtacggggcgaatacatttatgatctatacgggcgctccccaaaacacgcgccgcaaaaaaattgaagacttgaatatcgaagcgggccgcgcccatatgaaggaaaacggcatcgatgagattgtcgtgcatgcgccgtacatcattaacatcggaaatactacaaatccggcaacgtttgagctgggtgttgattttctgcgttctgaaattgaaagaacggcagcaatcggcgcgaaacagatcgtgcttcatccgggagcgcatgtcggagccggggctgagacgggcatcaaaaaaatcattgaaggtttaaacgaagtgattgttcccggtcaaaacgtgcagattgcgctggaaacaatggcgggcaaaggatcagaatgcggaagaagctttgaagagctggccgagatcattgcgggggttacgcataatgaacatctatccgtctgctttgacacttgccacacccatgacgccgggtatgatgtcgccaatgattttgacggtgttcttaacgagtttgataaaatcgtcggcatcgatcggataaaagtccttcatgtgaatgacagtaaaaatattaaaggcgcccggaaagaccgccatgaaaatatcgggttcggagagatcggttttgacgctctgcagtacatcgttcatcacgagcagcttgccgatattccgaaaatcctcgaaacaccgtatgtaggcgaagacaagaaaaataagaagccgccgtaccgttttgaaatcgaaatgctgaaagaaaagcagtttgatcaggagcttcttgaaaaaatatcagctcaataaaaaaggagggggaattgccccctccttttttaccctgagaattggttgaaaagttcgtcaactttccgagctgtttcttttgaggttatcgtttctacttttttcagcaggcgaagccgctcctgttcatcaaaaatattgatgttttttccgtgcatcagagccgctacctcagccgcttgacttctcgtaatgctgattccgtattgcttggaatatttcagaagatcgtccgcagtgacttgattgagccgctgcaaaataattctttgtattaaaatcatcgatactttcacctctttagacataatgtattgagcaaatcattaaaatgttacggcttttaatggtaaaatgaagttgcttactgtttaaaatagttattacaggaaaggagattttatgaccccaaataaacagcataaaagagagtcatttttacactttatcttcagggtcattatgattctgatcggggcgggttcagccgctgtaagtattgaattgtttctggtccctaataattttatcgacggaggcattatcggtgtttcattaattttagaccacctctttatgtccaatcccctcctcaatttcgccttattcgttgtgttactcaacattccatttatgattttcggatataaatatatcggaaaaacatttctcatctctactgttatcggaattgtcggtttagcgctgattgaatcctccttgcaccatgtggaggccattacgacccagcctattttggcgacggtattcggcgggcttttgctcggtttcggggtaggccttgtcatccgaaacggaggctcgatggacggtactgaaatactcggtatccttctcacaaaaaagctgcccttctcagtcggagaattcgttatgctcatcaatgtgtttatttttatttgggccggttttgtgttcggtccggagcaggcgatgtattctttcatgacttattatattgccatgaaaacgattgacgccgtcatccaggggcttgatgaaacaaaagcggtcattattgtggcagatcagtatgcggaaatttcagacgcaatcttgcatcggcttggaaggggaaccaccaagcttcagggaaaaggcggatatacggatgaatccaaagaagtcatttacgcggtcgtgacaaggcttgaagtgactaaattgaaatccattgtgtttgaaattgataaaaacgcctttattacgatcatgaatacccatgaaacgaggggcggtaagttcaaaaccgcgattcactaggctttcatttacttttcatcattttataggtataatttgatacatcataagaaaatggcctgctgttcagacagctgccattttctttttggagcgataccgtgttgtaaaggggaggtcctcatgaacgtacaagaagcgttgaacctgctgaaagaaaaagggtataaatatacgagtaagcgagaagacatgctgcagctttttgctgattctgataaatatctgaccgccaaaaacgtgcttgccgcattaaatgacgactatccgggtctgagttttgataccatataccgaaatctttcgttatatgaagaactcggcattttggaaacgacggagctttccggagaaaaactgttccgttttacatgctcttatacccatcatcatcaccattttatctgtttaacctgcgggaaaacgaaggaaattgagtcctgtccgatggataagctgcacgatgatttggaagggtatgaaatcagcggccataagtttgaaatttacggcacctgtccggcgtgccgataaaaaacctcctgctatatacaggaggtttttttcagcttttaacatgctgaaagctgtgtttgtttttattaatccaggcgacggcttcaagccaattatgcaccctgataatattggaatcgatggggagctgattatatggggagttaaaaaggataaccggaatgcctgcttcttttgcgatcattgtcgcgttgccgtggtgatcttcgaaaaataaatcaatgccgtgttttttgacggcttccactttgtgatggcctccgacaagctcaatgtgatcgtaatgaatgtcccggtttgcaaaccagtccagcgtaacatcttctaagtggccgcgtcttgccgtaatgtagataagacggtgctcttctttcagtccgtccagtgcctgcttggcaaattccgcgagcttcgcttctttatatatggctgcttcatgaacgttcatccattcccaaaattcctcgtctgtaatgttcaaaagcttcgtcagatcataatcagtcatatcatccaaggtaatggaaagatgaaatgagcggtttaaataagggacaaatgtatcctgtgccgtaactgtgccgtcaatatctatacctaaccgtaacatgtccacactcctataaattcatcccttcaagtgtaacataaacaattaacaataccagaaaagtttagcaaacatgaatccgtaaaaaacgcggaaactaaaaaagctcctttcataaaagaaaaagggggaattgaaggtggcatacgattacgaaaatcgaaaaggcaacgactattacgtggatcatggatcggaaggaaccgatatcacgcgtgatgtttattcagaagaaacagcggccgaaatctcagagccatatcgtgcttctgaccgggcagcagaccgtgatgataatcgggacggagtaagtgaaggccgggggatagggtatgcagcattggctatttctatcatttccctgtttgtgctccctgttttattaggggcatgcggcattatcgtcggctatatcgccagaagaagaggagcaggcgctttaggcggatgggcgatgggaatcggtattgtttcccttgtgcttggcatcttcattacaccgtttttttaacacaacgcaaaaaaaaagcttggcggaatatccgtcaagctttttgtgtttcttgttctgcttttgctttttctgcttcaagctttgcatagtgttcttctgccagcttgtcgatttcttttttgagctcttcgaccattgtttcttcagggactttgcggacgatttggcctttgcggaaaagaagtccttcgccgcgtgcgccggcaatcccgatatcagcttctcttgcttcgcccggtccgttaacggcacatccgagaaccgctactttaatcggcgctttgactttagaaatgtattcttccacttcatttgcgatgctgatgagatcaatttcgatccgtccgcatgtcgggcatgaaataagcgtagccgcgtttgaagcaagaccgaatgatttcagcagttctctggctacttttacttcttcaacaggatcggcgctcagagagatccggagcgtgttaccgattcctttgcttaaaatcgctccgagtccggccgcgctttttaccgttccggcaaacagcgtgcccgattctgtaattccgaggtgaagcggataatcaaatgcttttgacgctttttcgtatgcttctatggcgagattgacgtcagacgctttcatactgacgatgatgtcatgaaagtcaaggtcttccaggattttgatatgatgaagcgcactctcaaccattccgtcagcagtcggatagccgtatttttctaaaatgcgcttttccaaagatcccgcgtttacgccgatccggatcggaattcctttttctttcgccgcttttacgacggcttccactttttcgcgacggccgatgtttcccggattgattctgattttgtcggccccgccctcaattgcttttaatgcaagcttgtagtcaaaatgaatatcgacaacgagagggatggaaatttgttttttgatgtcggcaatcgcgttagcggcgcgttcgtccggacatgccacccggacaatttggcagccggcttcggctaaacggttgatttccgcaactgttgcttctacgtcgtgtgttttggtcgtcgtcatactctgaatgacgacttcgttatttccgcctattgttaaaggtcccactttgacgggacgcgtttttgtacgatgtgtgatttcactcacttgtcaatcgctccttaattgtagttaccgcttttgcaggctgagccttttacatgtcaggcaacttctatttacatgttatattgtaacagtgtatttgccgaactgacaagaaattaacgtttaattgcggtagacggggaatttataagcggtgcctgcctgaatggcgtttgcttttacattcggattcagcgcttcaaaatcttgtgcaatatcatctggcgctttatgtgcgccgactatcgacatcaccgtatcgccttttttgaccgtaaccgttctgtatgaagcttcctgttgggctggctgtgccgccgctgcgtatgctggaaggtcttgagaagggatcgtgccgattttaagatcgtaaaagataatgaatatcacaaataaactgccgaatacaaaagtaagccgcttcattccaaccgcctcccgcatacatttttacttcattgtatgcttgtcccattttgttcatgacaaaaaagaagaccgccgggggcagtctttgttatacatctgttttacttcgcggtatctcttttaagacgaggaaaaggatgataaagtttacaaaccaattcactaaaaattcactcggcaccgtaataacaagcgcgcgcatgatcgtaaagaatacggtcgaaagtgtaatggaataagccgaaagcttccagagctgctggtaattcaatgtctttctttgcgcatttttcaatatcaggccgatgacggcgagaaatgatacttcaatgaatttgcctgccgctgtcatgatgaacagcaaaacggacaggacggtgacgatcattgttttattttggtttaatgctgatatgatttctttttttgtgatatcggcaggcatcagcgaataattcatttctgtcgcttgtccgtctacagcaagcaccattttatttttcaaaatgccgatcgcattttgtttcgccgctatttgtttcgcgccgtaagcatctgtgggatcaaagacgatgacgaacccgttcgcttccgtttccttagaggcggacgctttcgtctgcaattctccgtttgaaatgctgaaatcagggaaatctttctttaacacggttttgaaaccgttcattgagtttacggtgccggagcaaaggtaataagcgcttggcagcgtaaaaaggacagacagcaaaaatacataaaggatcgcttttcctatcccctgaaaccgtgtttttgcaatatctgccggagagtatgtacttttcaataaagccgtaaatatgttcaacatcttcacttcctagcctaaactggtatatgttgcttattgtatcgttcacaggggatgaacacaagtgagagtatttaaagcggtgataaggaatcatacataataagataaagcgggaagcggtgatcgcccgcaaaacaaaggagggtgtttttgtcatgagtgttttgtattggctgattatcattgcggtcttcatcattgcttttatcgggcttgtatatccggtgattccaagcgttatttttattgtggccggttttcttctctacggatttttgttttccttcagtccttattcttacctgttttggctcattgaggcggtatttgcggccgttttattcgcagctgattatgtgtcaaatttacttggcgttaaaaggtacggaggaagcagggcggcaatctggggaagcacgatcggattattgatcgggcccttcgttattcccgtggcaggcattatattagggccgtttatcggtgctgtctgcgctgaggtgtttgttcatcaaaaggatatcaagtccgcggcaaaagtggggctcggctcgttaatcggttttttaacaagcgtggcggcaaaaggcgtcattcagctctttatgatcggatatttcttatggacggtgctttagaaaggtttaatttcggcagggaacggataaagtgtaatatgtctgctggaatcgccggattgtgagctttttcattgattaccatgctttcttttgttacattgagattagaaaagttcgcgttaagcggcatttcagtacatatatttaaaggaggaaaaaaattatggcttacaaacttccagaattgccttacgcttatgatgctttagaacctcatatcgataaggaaacgatgacgattcatcatacgaagcaccataacacatacgtgacaaacctcaacaaagcgatcgaaggatcagcgcttgcagagaaatctgtagatgagcttgttgctgatttgaacgcagtgccggaggacatccgcacagctgtccgcaacaatggcggcggacatgccaaccactctttattctggactcttttatctccgaacggcggaggcgaaccgactggtgagcttgctgaagagatcaaaaacacgttcggaagcttcgatcaatttaaagaaaaattcgccgcagcagctgccggccgtttcggttcaggctgggcttggcttgttgtaaacaacggcaaacttgaaattacaagcacgccaaaccaagattcaccgctttcagagggtaaaacacctgtcctcggtcttgatgtttgggagcatgcgtactacctgaactaccaaaaccgccgtcctgattacatttcagctttctggaatgttgtgaactgggatgaagttgcccgtctttacagcgaagcaaaataaatagttcgatcaaacaaggtctcccgcgggaggccttgtttttttattgactttgaatccttttacatatctcagtttgagtgagacaaactaatgtgtagtaaaggggagtcaatgatgagcaaaataaaaaaaattatcggcgacatcgaaataaataaagggctgctgctgttattgacgattggcggcctttactcattgggcatcgcgctgtcaaatacatttgtcaacgtgtatttgtggaagcagtcgggaaaatttattgatttggccatatacaatttgtcggtcgtaacgatgcagccggttacctttctgctggccggccggctggctaaaaaaattgacagggtgtttattctcaggttcggcgttatctttttggccgctttttatttaagtgtgctgcttgctggagaaactgcggcttcccgtctcgttttgataggggccgtgctcggagttggatacggcttttactggctggcttttaatgtgctgacgttcgaaattacggaaccggaaacgagagatttttttaacgggtttttaggcattttgtcttcatcggcgggcatgatcggtccgattgtggccggatatgtcatttcaagacttgaaaacaatacgggttatacaatcattttcagcctgtcgctcggcttatttgcccttgccgtggtcatgagcttttttctgaagcggagggagtcgaaaggccggtttatgctgaaaaaagtttttgatgagcgccacacgaatctgaattggcgccggattaccaacgcgcacttttttcaaggcttgagagaagggatttttgtttttttaatcagcgtttttgtattcattgcgacaaacagtgagctggcgctcggaacattcggtctcgtcaattccgcggtttctttttttgcctattattttgcatcaaggctcatcaaaaaaagagctcggaaaaaggcgattcttatcggcggattgatcttgtacggtgccctgtttcttatcatttttaaaatgagcttcacgacgctccttttgtacggagtgtttattgcgatcggctatccagttctgctcgtgccgtatgtctcgcttacatatgatgtgataggccgggcgcggcttgccagaaaagccagaattgaatacattgtgctcagggagttatttttaaatgcgggcaggatcgtttccatcctttgtttccttgtaatcgttacattattcaaggaaaaagtgggaataccggcggcgctcgtgctgctcggagccggccatccgctgatttattactttataaaagacatcagactggatacggaaacttctgatgaaacagtagaagaagaccgacaaaaacaggcggcggaaccgaattttataaaaggagaaagataaaagggttatctgtagaaaaatatcgaaaaaacctttagaatgaaaaatgacacctgaacagaaggtgtcatttctttctgtaaataagaaaaggtgatgtcatgaggagaaataaaaagaaaatagctgtaaacaaagaaaagaaaaaatcactgccgatccggcttaattttttgtttttggccgcgtttcttattttcacttggattatcgtcgagcttggcatcaagcagatcgttcagggtgatgattataaaaacgccgctaataagcaggaggagtctgatgtcagcacggcggttccgagagggaaaatatacgaccggaacctaaatcccatcgtaacgaataaagcattaaatgcgattacatatacacgttcagcctcaaccacccaggcgcagcgtttaaaaatcgcaaaaaaactgtcgggtatgattaaggtaagcaccaaaaaggtgactgagcgggataaaaaagactattggatgttaacgaggcctgatgaagcgaaaaaactgattacggccgaagaaaagcaaaaagctgaagacaaaaaactgtctgaagatgatttatatcagcttcagctgaaacgtatcacagacaaacagctgaatgagctcacttcaaaagatatgcagatccttgcgatcaaaaggcagatggattcaggctactcactgacgcctcaatacatcaaaaatgaaggggtgtcggcaaaagaaatggccgtcgtcagcgaacatttagatgaactgccgggagttgacgtgacgtctgactgggaacggtcttatccttataaaagcctgatccggacattgctcggcagtgtatccagtgcgaacgaaggtcttccttccaatctgctggatcactatctgtcactcggctacagccggaatgacagggtcggaaaaagctatttagaatatcaatatgaaagcctgctgcagggtcaaaaagagaaagtgcagaacttaaccgactcatccggaaatgtcacgggcagcaaagtgatttcaaaaggacaggccggcaaagaccttgtattatccattgatatggacctgcagaaatccgttgaaaaaatcattgagaaaaatttaagatcggcaaaagcgagaccgagcacgaagcttcttgatcgggccttcgtcgtcatgatgaacccgaaaaacggagaagtgctgacgatggccggcaaacagattacgaatgatcatggaaagtacaaaattaatgattatgccctcggcgcaatgacttcctcctacgcaatgggatcggcggtcaaaggagcgacggtgttgaccggactgcagacgggcgcgattaatttgaacaccgttttccaggatgaacctatgtatttcaagggaagtaaaaacccgaaaaaatcatggaccaatttaggtcccgtagatatccaaaaagcgcttcaggaatcctcaaacgtgttcatgttcaaaacggcgattgctgtcggtaaaggggagtacaaaaaaggccagtcccttccgcttgatatgaaggcattcgatactttcagatactacttcaatcagttcggactcggagttaagactgggattgatcttccgaatgaagcaaccgggtaccaagggacacagcgaatttccggtcttctgttagactttgccatcgggcagtatgatacgtttacaccgctgcaaatggcgcagtatgtatcaacgatcgccaatggaggctatcgtttgaaacctcagcttgtaaaagaggtcagacagcctgattcgaaaaaaggaatcggagccgttgtagagtctgttcagccccaagtactgaacaagattgatatgaatcatgcagacattaaagaagtgcaggcaggtttcagacgtgtcatgacaaaagggacagccgcaactgattttgcgacggcgacatacagtcctgccggtaaaacgggtacggcgcaatctttctatgacggtcctgacaaatcagagacgggtgaaggaacgtataatacgactcttgtcgcgtatgcacctgctgataatccggaagtggctatttctgtagtcgttccttgggcctatattaattacagcgatcgatattcgattacgaatgatataggaagagcagctctggacaaatactttgagctgaaaaagaaacaagaagataataatacgaagcagaaaaacgaagataaaattcaggaagacgctgaaaacggcaatacaagcaactaacagaaaaacgctcacaacctgtgagcgttttttttatacaaaaaaacatccggatttacaaaaccttaacacttgatttatacgcattttacaagaaccctttactctatacgtgtaggacaaattacacattaaatgcagggggaattcaggaaatgaaaaaaaacaaatggatgcttatgcttctgatggctgctgttatgattgttgctgcagcatgcggaaatgcaaaggaaagcggcaagacagacagtcaatctgcaagtgaggataaaaaagcatcaggttctttaaccatttctggttcatcagccatgcagccgttagtactggcagcggcggaaaagtttatggaaaaacatccggatgctgatgtgcaggtgcaagcgggaggttcaggaacaggactttcgcaagtgtctgaaggggcagtgcaaatcggcaactcagatgtcttcgctgaagaaaaagaaggcattgatgcgaaagccctaaaagaccaccgagtagcggtagtggcgatggcggctgcggtcaaccccggtgcgggcgtaaaggatataaccaaaaaacagctgacagacgtctttacaggtaaaattaaaaactggaaagagcttggcggtaaagatcaaaaaattacactcgtgaaccgtcctgattcatctggaacacgcgctacgttcgtcaaatatgctcttgacggagcagagcctgcagagggcattacagaggattcctccaatacagtcaaaaaaatcattgcggaaacgccgggagcaatcggttatctggcattctcttatataaacgatgacaaagtaacgcctttatcgatcggaggcatcaaaccggaagagaaaaacgtcgtcacaggcgagtatccgatttgggcttacgagcactcttatacgaaaggtgaagcgtcaggccttacaaaaacgtttcttgactatatgaacagcgatgaagtacagaaaagtatcgtaaaagatcagggctacattccgatctctgatatgaaagtcacacgtgacgcaaacggcaagcaaagctgaggggagggcgggctccccgcctcttcttctttataggagtgtaaacaaatgataaatcacagagaaaaagagtctgtaagcgaacgcttaataagctcaaaacaaaacaggcaattggatgaagtccgcggaagggtgattgtgtctgtgtgtgccgcgattatcattgcggcatcagcggcgatcacaatttttctcggcataaaggggctgcaatctttttttgtaaatggtgtaagcccgattgagttcttaacaagtctgaattggaatccaacccaggcaaaacctgagttcggcgcgctgccttttattttcggatcatttgcggtcacgattctgtccgctctgatcgcagcgcccctcggtattgcgggtgccgtgtttatgacggaaattgcgccgacttggggaaaaaaggtgctgcagccggtaattgagctgcttgtcggcattccgtccgtcgtttatggattcataggtcttacagtattggttccgtttatcggctcttttaaatcaagcggaacgggtcacagccttctggcggggacgatcgtactctcggtaatgattctgccgactgttacatcgatttccgctgatgcgcttgcgtcacttccgaaacaccttcgcgacggttcatatgcgcttggggcgacgaggtggcagacaatcagaaaggtgcttatcccggcggcgtttccgacattgctgaccgctgtcgtgctcgggatggcaagagcgttcggagaagcactcgccgtacagatggttatcggaaatacaaagcttctgccggaaagcctgcttgatacggcgggaacattaacgacgattatcacgttaaacatgggccataccacatacggcagtattgaaaataatacgttatggtctatggggcttgttcttctcatcatgtcgtttctgtttatattgctcatacgctacttgtcatctaggaggaaagtgtaatgaaccggaaaataacggataaattggccaccggtgtattcgggttatgcgccgctgtaatcgcggcgattttggcaggattgtttttgtacattcttattcacggcgtctctgaaatctccttgcgttttcttacgtcaaaatcgagcgccattgcctcaggcggcggaatacgggatcagctttttaactccttttacattctgtttatcaccatgctgatcacgataccgcttggtgtggggggcggcgtctttatggctgaatatgcgccccaaaataaaatcaccgattttatcagaacgtgtattgaggtgctgtcttcgcttccgtccattgtcatcgggatgttcggcatgctgatgtttgtaaacctgaccggatggggctacacgattatcgggggcgcgctcgcattaacggtctttaaccttcccgttatggtccgggtgacagaaggcgcgctcactgcagtccctaaggagctgaaagaagcttctctcgctttaggcgtatcgagatggcataccgtcaaaacggtgctgattccgagtgcgattccttcaattttaaccggagccattctggcatcaggaagagtattcggagaagcggccgcattgttatttacagcggggctgacaacgccgcggctgaactttacggatttgaacccattttctgaatcatctcctttcaacattttcaggccggctgagacgctggcggttcatatatggagtgtcaatacgcagggaatcatccctgacgccgaagcgattgcaaacggcggctcggcggtgctggtgatttcggttctcttgtttaacctttctgcgagatggctcgggtctgtcatttataaaaagcttacggcaaattaatcggaaagaggcgaaaacatgatcgatcacatcatcagggaacaagcggaacagacaaagcgtttgccggagtcttcgattttggaagtgaagcatttatcaatttattacggtgacaaacaagcggtaaaagatgtaaacatgaatattgaaaaacatgcggtgacggctctgatcggtccgtcaggctgcgggaaatcaacatttttgagacagattaacagaatgaacgatgccattgcttcggcaagaagcgagggagagatcctttatgaagggctgaatattttgggtgaagcgattaatgtcgtgtctctcagacgggaaatcggtatggtgtttcaaaaaccgaatccgttcccgaaatccatttacaataacatcacacatgcgctgaagtatgcgggggaacgcaggaaagccgttttggatgaggcggtcgaggaaagcttaacgaaggcggcgctttgggatgaagtcaaagaccggcttcattcatcggctctgtcgttatcaggcggccagcagcagcgcctttgtatcgcccgtacgctggcgatgaaacctgccgtgcttcttttagatgaaccggcttcagctctggaccctatttcaaacgccagaatcgagacgcttttgacagaactgaaaaaagattattcgattattatcgttacgcataacatgcagcaggcgctgagggtgtctgaccgaacggctttctttttaaacggggaagtggtggaatacgggcagacagaacaaattttcacgagtcctaaagcgcaaaagacagatgactacattaacggaaagttcggatagggggaaggactgtgagtcttgtgaaggaagcggtgcacacacagaatttatttgatattcacggcatgaacgtatggtacggagcccatcaggctttaaaagacattacgatcggttttgaggagcggaaggtaactgcgatcatcggtccgtccggctgcgggaaatccacttttattaaaacattaaacttaatgctgcaaatggccccgaatgtcaaagtgacaggcgacatgatctataacgggcgcaatctgctgaaggaaaagacggatgcggcagaattaagaaaacagatcggtatggtgtttcaaaaaggcaatccgtttccccagtcaatatttgagaatgtcgtgtacggtccgagaattcacggcgaaaaaaataaaaagaaactgcttgaaatcgccgaggaatctttaaaagcagctgcgctctgggatgaagtgaaggatcgccttcaccaacaggcgctttcactgtcaggcggtcagcagcagcggctgtgcatcgcaagagcgctcgccaccaaaccggacgtccttctgatggatgaaccgacgtccgctcttgatcccgtgtccacgcggaaaatagaagagctgattttgacattgaaagaaaagtatacaatcgtcattgtgactcataacatgcagcaggctgcgagggtctctgatcaaaccgcgtttttctatatgggcgaactggtggagtggggcgatacgggcaaaatattttctcagccggatcatcaaaaaacacatgattatatcaccggaaaattcggatgaaaaaaacgggcccggccattaaccgggtccgttttatatgtctattaaaaaagcctgccggccgtatccatctgaatggacgatgcctgcaagcttttttagcgggttaatgttttgacgatttttttaaagctcatatctgaatcgactttgaaatggccggcgcggatttctttgtggtagcctgcgtcaatgacgtaatcattgaagtctttcgctgaaggaataatcccttctttttcaagaatggatgacacatcagcagtgctcattccgtctttaatcgtcagtttgtatgttacttttttctttttggcgtctgtgttttggtcgttgtttaacgatttttctttagaatcaagcagtttttgatagtcatcccggttgacggagactttatgctgatcgtcgaggtagctgtttacttctttttctgtcaatgctgttttttcggttttaacggcggctgcctggtcatggtcagtcaaatagaagacagcggcgagaacggccgtcgctaaaatcatgcctgctgcaaaagcctgaatgccccgttttgtcatacgagcaccttctcattatctttaataatggtattgacgtcctcgacagacacgtgctccgcttttgcgatggcttccgcagacattccgttgttatattttgaaatgatttgtttggcgattttttggtttatgccgctgcttttggctttgcggatcacgaggttggtttccagcaattcttcttcaagcaccgtcattttctttttcaacttgtaaatttcctgcatggcggaaagctgaagcgtttctagctcctgttccacgtctttcatcggatctctttgagaatatgagaatgcaataagcgctatactgacgataaacaacgcaataatagcaatttccacgtttcatcaccttctattattaatttgcccttcttttttataccataaaacgccgccattctaaaggaaatagagaaaaaaacggaattttgtcggaaaatcttttttactcggggagcaaacggttatttctctatagatttcgtatcagaaagcccttttttgtcctgtttcgtcatattttaccttcttctgacgcaagctcattcagaggatcagaagcgtaaactgatgttttctgcacttaaacaacatttcatgtaaatcagctctagcattccgtccattatagtggtattatatataagtctgaataagtaaatgatatttagtttggagggaaaataatgcgcgttaatattactttggcttgcactgaatgtggtgagcgtaactatatttctaaaaagaacaaacgcaacaatccggaccgcgttgaatttaaaaaatattgcccacgtgataaaaaatctacgttacaccgtgaaacaaaataagctgtttaacacagcggaaaaagctggagctttcaataaagttctggcttttttgtctttcagggaggtttgagaaacgtgaaagcacaaatcagaaccgatataaaagcaaagctttctgacatgacagaaagtgaatgggagaaaaaatgccgcagcatgcgtgaaacgctgttttctttaaaagaatggagacaggcccgcgtgatcgccgttaccatctcgacacgcctggaaattccgacacggccgattattgaacaggcctggcaagagaaaaaacaagtctgtatcccaaaatgctttccgcagacgggagcaatggagttccgtacattttctgcgtatgatcagctggaaaccgtatatgcgggcctcagcgaaccgatcgagagtctgacggaaaaagccgcccaaaatgacattgaccttgtgattgtgcccggcgtggcttttgaccgggaaggcttcagaatcggatacggcggaggatattatgatcggtacctgtccggttataaaggccgtaccgtgtcgcttctctttgactgccagctgacagaccgcattccccgcatgccccacgatattccggtcgatatgatcgtgactgaatctgaaaccatcgcttaatcgcataaaaaactttttgcaccggaataattctcgctgtttgacaaacgataggggcaggagggataagatgaaaaaattgttgatctactcattatgcgccgtatctgttttagccgtttaccaaaaccgctaccgtctgatgaacagcgtgctcagccagccggggatcagacggacattcattcatttctttttaaaaataccgtttatcagaaacaaattcattcagcaggcattttaaacaaatcccgttttttaagcgggattttttgcataagaaaacctgccggtaaaaaacggcaggttttctcgtattgtcagctttttttcaggaaaccgagcagaattgagattataggagaaatgtacaggaaaaaggtaaacggcaggtagtcgacgacggaaacccctaatgcgcttgccataaaagcgccgcttactccccagggaatcagcgggttgatcaaagttccgccgtcctcaagcgaccgcgcaaggtgaatccgcttaatgccgagcttgtcatataaaggtttataagattgacccggaattaagatcgacaaatactgctcacctgtcgcaaggtttacgcctatacttgagaagacggtcgccatgacaagacgtcctttcgtatgcacgccttttatcaatccttgaagcagcgccgcgatcaggcccgttttttccatcaggccgccgagcgcaaaggcgatcataatcagagagactgatcccatcatcgattggagcccgcctctgttgataatgctggccacagcctggtcgccggttttaaacgccgtcccgctttgcagggcggatataaatccttgaatgctgctgtcaggaataaaaacagcagtcagaagccctgcggaaataataccggcggtaagcaccggaatcacggaaacccgtctcacagctaaaatgatcactaacagaggtgaaagaagcgaccaaggcgtaacgtgcacggcctcttttattccggaaatgaccgcctcaatattttgcgttgaagcggcatttattgaaacagatgaaccgagaatataaaaaagaacgatcgtgatcagcagtgccggaacggtggtgcccatcatatggcgaatatgcttaaaaatcggaatttcgccgattccggcggcaaaattcgtcgtgtcggacatcggtgacattttatcaccgaaacaagctccgcaaataactgctcccgccgtccattcgagcggaactcccgccgcgcttgctacccctaacagcgcgacgccgattgtactgacagttgtcagacttgagccgacaagcgtgctgataatcatgcaggaaaataatgcggtcaaaagcagctgactcggctgtataattgacaaagcgtaaacggtgacggtgggaatggcgccgctgtacatccaggcgccgatcagcacaccgatcaaagccagcacgataatcggctgcaccccgttttttaatccgctgacaattcctttttcaagactctcccacgagaaaccgagccacaaacctgccagagacagaataatgacgcaaaagaacagcggcatatgcggctctgtatgaaagaaaaacaggcaggaaataatgactgctaacatcaagacaaataaactgatggctgagatgaacgtcagccttttttcttgtttcaaaacaacaccccatcaaactttaatccttttgtgcttttgggcacgaaagtattgtaacagaaaaacgcataaatgagtgtttttttacaattgtgaatatacaatttatgaaaataatacaaggatattttctccaatcgttttttgcttgacgcccggatcagtgatgaaatacgcttatactaagaagaatagaaatggtgaagaagatgaattcattttatgacgtgcagcagctgtttaagtcattcggacatattgtttatttcggtgacagacaagccgaaattgactttatgaaagatgaattaaaggaaatgtacttgtcaaacgtgattgaaagagatttatggcaaaaagccgccggagttcttcagagagaatcggagcggatcagaggcagttaacacagcaggattttaataagaaaaggagattattatggaagatacatggtttgcggggattgatctgggcggaacaaccatcaagctggcctttatcaacatgtacggtgaaattcagcataaatgggaagttccgaccgataaatccggaaacacaattacggtcacgatcgccaaagcgcttgatcagaagctggaagaactgaacaagccgaaacggattgtaaaatggatcggaatgggagcgcccggacctgtggaaatgacgacgggaatggtctatgagacgacaaatatggggtggaaaaactatccgctgaaagaccatctcgaggcggaaacgggtattccggccgtcattgaaaacgatgccaatatcgcggcgctcggagaaatgtggaagggtgcaggtgacggggccaaagatgtcattttagtgacgctcggaaccggagtcggcggaggcatcatcgtcaacggagaaatcgttcacggtaaaaacggggccggcggagaaatcggtcatatttgcagtattccggaaggaggagctccgtgcaattgcggaaaatccggctgcatcgaaacgattgcgtccgcaaccggcatcgtccgcatcgcgaaagaaaagcttgcggcggtttccgactcttcgctcttacaagtgcgcgatctgacggcacgtgacgtgttcgaagcggctaaacagcaggataagaccgcgcttgaagtcgtcgattatgtcgcaaaacatttaggcctcgtgctcggaaatctggcaagcgccatgaatccgacaaaaatcgtgctcggcggaggcgtgtctaaagcgggggaaatcctgcggtcaaaagtggaagagaccttcaaaatcaccgcgttcccgcgttctgcggaagcggccgatatttcgattgcggcacttggaaatgacgccggagtcatcggcggggcgtggattgccaaaaatgaatggctcaaacatcaaaactgctgaagaaagtctgcctgcccatatcgcgggcggctttctttttttatctcccctgtcatatagtttttaaaaaagggggatgaacatggcgggaattcgtgtcaaacctgaattgaaacagcatatgaaagatattgcaaaggtgctttcaattgatgaaaaactgttgaaagccgctgataaaacggcggaaagcgatgaattattttgtcccggctttgccgtgagcgggcagtcagagggtccgccgcttgagacgctgagcgggctttcgcgatacatccggcactgtgaaagcgttctttccgctgatcaatgggtgaaggaagaaaaggtgtacggctccgaatcggtttatgaagaaattgagaaaataacggatgtctttccgtttgtcacatgccgtaaaatcggcagttccgtattgggaaagccgctttatgagctgaaaataggtgcggatacggccgaaagaaaagtccatgtaaacgcctcatttcatgccaatgaatggatcaccacctcggtcgcgcttaaatggtgtaaagaatattccgtggcattatgcgaaaataaaaccgttttcgggcagtctgtgcttgatatattcagccggacatcattgtcattcgttccgctcgtaaatcccgacggtgttgatctcgtactttacggatgtgaagatttatcagaaaaaaaagaattcctcaacgaattaaatgagcaccgcccggatttccgcgaatggaaggcgaatataaacggtgtggatttaaataaacatttcccatccaattgggatattgaacaaaggcgcaaaccgaaagccccttcataccgtgattttccaggaacggcgccgctcactgaaccggaggcgcaggcgatgcaccggctgataacggaacagccacctgaccggctgatcgcgcttcatacgcagggagaagagatttactggggatacgaaggatgtgaaccggagcaatcatcccagatgattcgggagtttgaagcgataagcggaaaccgctatcaaggcgttaaaaccattgacagccatgccggttttagggattggtttatacagcagtatggaaaagagggctataccattgagctcgggaagggaaaaaaccctttgccttttcatcagtttgctgatatttatcaagcgacggaaggtattttgtggaggtcgcttgttttttgagacatctgtgaaatttctcatttgtttacataaacaaatatgggacaatagaaaagaatggagggaaggctgatgagatacttggtttgtgttctgctgtccgcattcgttctgtgtttagcggcctgtgaaccatctcatcagcagcaagacacaggcgtttcggcaaaatcggcagaacagaaaatcgttccgctcagtaaaaaggaagcggaaaaaacggaaggatggctggataacagaacaattctgtatacagcacatcatcagctgatgaaatatgatcttttcagcggaaaatccgaacggctctatgaaacaaagggcaatattgtcaatgtaaagatcagccggaaaaaacagctgattctcgtacaggtgacaagcagcggtcagactgagcttgtgcttatgaacaagcaggggaaaagactttatcacaaagcctttaactcttatgagctggagacggcttggaatccgtatgacccgtatcaaatgatgattaccgtttttactgaaacatgggacttcacagcctatacggccgatatgaacaacggcattttaaaaaagagtcccgttcaggccccttttgtccattggacctccactgatgaattccaatatatcaagcaaggaaaaacggaggaagagggtcctttatattcttatgacttgcagacgaaaaaagaaaaaagagtgcttcatcacgtcatctgggctgattcccgcccgggcatgacgattgccgtcagaccaacggatcaatcggacggagacggcgagttctttttccaaaagccggcatccgtgacacaccgctttcctctccaaaaaaagtatgagagcttcgcgccgatggaatatgattacgatcagacacacaagcggttttacatatttaagcctgaaggccgctcttacaatctgatcagctttgacttaggagacgaacgggagcggacggtgctcaaaaacacggaaatggagccgattcagatctctccgaacggggaatacgctttatacggctttacgtatgaccgtctgatttcactgaaaacgggcatgacagaaccaatcataacaaatgaaaaaggagtttgaaccaaatggcaattgcagatgtcacaatcattccgatcggaacaaaaacaccgagcgtcagtgagtatgtagcggatgtgcaaaaaattttggagggttacaaagctgccggcaaaatcaaatttcagctcacgccgatgaacacgttgattgaaggtgagctgagcgacttattcgcagtcattcaggatattcacgaagccccgttccaaaaagggctgcacagagtggcgacaaatatccgcattgatgacagacgtgataaagaaacgacgctggagagcaaaatcaaaagtgtcagcaaacatttgcagcaataaaaaataagcctgtatccattggatacaggcttttaatgtgcagtcggatagccgctggttacaacggtcattacggtaaaccagccaaacacgcccagcgtggcggcggctaacaaaaatcccaggatatttctctgtctgacagcccgcaggactcctaatacagctaataatgcgacaaggccgaagattacaacaagtaacatcatgctcctcctttgtcattggaacctgaaaatctttccatttcattttaaccgttttcattttgtttgtcgatagcgttttcccggccgcattcattgaatcttccgcagaaaaccttcataataagggcatatacataaagaggtgatgaaagtgaaatggagacgaatgccggccgggccgattcaggcaaacgcgtattttcttgtcagtgaggatcagtcctgtcttatttttgatccgggcggggaagcggacaaaatcaacaattacataaaagaaaacaatctgaagccgctggccatcttactgacgcacgctcattttgaccatatcggcgcacttgacgaagtaagagacagatgggatgttcccgtataccttcacaaaaatgaagaaaagtggctggaggactcttccttaaacggatcaggcatattgcggggcatcgccgtaacggcacggcccgccgaacggctcatcgaaggcgacggcattttggacatcgggcctttccatttggagacattgtttacgccgggacattcaccgggaagcgtttcttattatgtgaaggacgcggatctggtgatttcaggtgatgtgctctttcagggaggcatcggccgaactgatttacacggcggaagtcaggacgtattgcttgattccattcatcaaaaactgctcacgcttcccggacatacacttgtgttaagcgggcacgggccggaaacggacatccagacagagcaggagcgaaacccgtttatcaatggtttttcactgtaaatgaaaaaagacagaccataatcggtctgtctttttctgttcagtgggttccgccgcccggtgtcataataaaaatagagtagtatgtaaatccggcgaaaaatacggttaagtaagctccgaaaatataaatatacatccgctcagtcagattcaaataagaaagaaatacgaaaaagatcgtctgtccaaaaaacaaaagagaagcgtctttcatgccccctagaaaaaacatgactgcaaatatccccgtccaaaatcctaacacccggaacatgcgattcattccttatcccctcccgagagtctatctgaagtttattataatagatcggcactcaaaatgtaaacattttcatgattatatttattgtggaatttatgtctttccctgtgttttatatcttatgccgttctctaaaaaagatccgaaaaatctttttgaaatacgtttagggaaaaaaagttcagggtacttatgttaacaaagagacggattatccgagggaggaatttttaaaaatgaaagaacttattttttattcatacccgagctgcacatcatgccgaaaaacgaaacattggttaaaagcccacaatgttgactttcaagagcgacatctattcagggagacaccgacaattgatgaattgaaacagatcttatcattaacgaccgaaggaattgatgaaatattggcgacgagaagccaaacatttaaaaacctcaacctcaacattgaagaaatgactgtaaatgaagtgctgaagcttttgactgagaagccgaaactgctgcggcgtccgattctgatcgatcgcaataagctcgttatcggatacaatccgggagaactgatgaagctgacgaagaaaaaaacggtacatcaatctgtatcataagagaaaaacgaagatccgctgatcaaatttatcagctaatcttcgttttttgcggttgcgggactgggctagctggattcgaaccaacgatcacggagtcaaagtccattgccttaccgcttggctatagcccatcggatgtaattacagtatgtgcgtccggcgccgatttatacatacaaagtaatttgaatggaggagacccgtgaaacatttgaatgaaacattatctcgaaccttaattgaagaatcaggtgaaatcacacgccagtggctgctcataccaaaatcggggcggccttcagatgatcagaaagcggaaatgcagcaccgtctgttaattgaaatcgttgccggcattttatcggaaaaagaaggcggagaagaggagctgacaaagtgggcgcttcagttcgcaagggaccgggccgtccatgaagtaccggtctatgaaagcgtcacgagctttaaagaattccggagattggtctggaaccgtatacagacatgctgcgaaacgatgtctgagaagcccggggcgaatgcggtattccattggggagagaagctgaacaaagcaattgaccatatgattgaagtatttacagaggaatattataaagtgacggttacacaattaaacgcccaaaaggaaatgattaacgaactgagcgcgccgattatgccgattgccgccggtattggaattttgccgcttgtcggcgaaattgatacctaccgggcaaaaatgattttggaatcggtgcttgaccaatgttcttcactccggctttcttatttatttttagatatatcaggtgtgccgattgtggatacgatggtcgcttatcagattttcaaagtgattgacagcacaaaacttctcggcatagaaacgacaatctcaggcatcaggccggaaatcgcgcagaccgtcgtgaagctcggcatcgatttttctcaggtgaaaacggagcagagtctggcgaaggcgctggcaaaaaacggatttatcgtaaaagaatcattaagatgataaaaagctgaatggccgggagggatttctccctcagctattcagctttgtcagcttcaatcgtcatgatatgatggctgtcgatttcttttaccgtaaatgtgtagccttcaaaatcaatggtgctcccgggcttcgcgtcaatatgctgagtaagaaaccagccccccagtgtatcgacttgatcagccgtaatctctgttccgagtaaatcattgacgtcactgatcagcaatttggcgttcaggagatagcggttcttcccaagcttttgaacggaaggtgtttcgtccgtatcaaattcgtcgcggatttcgccgacgatctcttcaatgatatcttccgccgttactaaccccgcggttccgccgtattcatcaatgagaatggccatatgggcgtgttcccgctgcattttaacgaacaattgataaatcggaatcgtctcaatcacatggatcgccggctgaatgtaagggctgagttcgtgttttgtaaacgccgctccttctgacaggaatctgaataaaacttcttttatattgatgatgccgactacatgatctttatctccttttacgacgggataccgggtatatttatttgttttgataatgtcccggagcatatgtcccgatccgctgtctaacggcaggctcaccatttcattccggggcaccataatttctttggcagtgcgcttatcaaatgtaaaaatgttatttacgtaatgcagctcactttttttgatcatgccgcttcgatagctttcggcaaggagcacccgcaattcctcttccgtataagccatttcatgttcggaagcaggcttcaagccgaacatggctgtaatcaggcgggcggaatgattgagcagccagatgaacggaaacattaacttataaaacaaaatcatcggtctggcagacaaaagtgtaatccgctcggctttttggatagcaaaacttttcggggcgagttcgccgatgacgacattcacatatgtaaccagcagaaaggcgatgatcaatgacagtacttgggcaaccgcttcgtgaactccggtctttaaaaataacggctgaagcattgctttgactgtcggttcacccagccagccgatccccaaagcggtgacggtgatgcccaattggcacgccgataaatattcatcgaggtgtgtaatgacatgcttggctgcttttgctccttttacatcttcctcaatgagctgattaatacgggagcgccttgctttaacgattgaaaactctatggcgacaaaacacgccgttaataatataaatagtacgatggcggatagtttgatgatatacaatgtaacgccttccgcgaaggaaggcttgcacctcccttttttcggaataataccactgtagaaagctgctcaaacatcgaacctggtttagcccgcctcatttacggtaataaaacaagaaagcgatactggaggatgacaagagatgaaggtacattcgggtgcggactggctgtggtaccagctcggtccgcatgaaaaaacggaagcgaaaaaaatgatccatcacaatcactggccgcaatgcgaaaagtggtttgaacatgaaaatcatataaactttctgcgctcagatacaaatgatcagaataatgaagcggttttcggatctttaatctatcatcaaggattagatgatgaaaaaaaccataccgtatttcacttttatattacgagagacttcttttttacgattaattttgatttttcgctgctgcgcggtgtaaaagaaaagcatgccacacagcagattcaaacctgtgaaaatccgattgaaggcttttttgttctgctgggagagctgatgaattcctatctgatcggactggatgaatttgaagtcaagcagcggacgctgaaatggcagattcatgatgacaacagcaaaggaatcttggaaaatgtgcataaactgcgccatgagctgttcatttggaaaggccttacactgggggctaaaaaagtggaaatggctttaaaagaagcgtttcttccgaaaaatgacaggcagaaagattacctcagagctcatcataagatggaaagagggattacatatatcaatgagtttgatcaggaactgagcaatctgctgcacgccgaggaagtcattacctcccaaagaggaaatgaaattgtgaaagccttgacgatttttacaactctctttacaccgatgacggcgcttggagctctctgggggatgaactttgataacatgccggagcttcattggaaatatgcgtatatctgttccatcgtgctcattattgtatcaaccctgctgatttatatttatttgcggcagaaaggctggacaggggacattttgagggagcatcaaaaaaaatatttgcggaaagaaaagaaacgctaagaagagcaggcatacgcctgcttttttgatggctgaaaatggccgaatggttccggatttcattcagtaaatcaatgtcagggggcttattttttatttttttgcgttttacacagtgtaaaacgcataatctctcctttgccggcttttgtgtatctgatttacaatacgtgcggaaggagggaagtcttgtgaaaaatattgaaacatacagcaggaacatcataaacgaggcctatacggcaagggcttcagatatacacattgtgccgagagaaaaggatgctttcattcattttcgcatcggccatgctcttgtgaaaaaaagagtcttaaaaaaagaggaatgcgtaaggcttatttctcatttcaagtttttatcggccatggatataggagaaagacgtaagccgcaaaacggttcattgtctctgccgcttccgacggaaaccgttcatttgagaatgtcaaccttgccgacaatgaatgatgaaagtcttgtcatcaggcttttgcctaagcggcagattccccctctggataaactgtccttatttcggggggcgggcgccgcactattgtcctttctgaagcattcacacggcctgcttctgtttaccggcccgaccggctctggaaaaacgaccactctttactcgcttgtcaactatgcaaaacggcatttcaaccggcggattgtcacgcttgaagaccccgtagaaacaagagatgaggatgtgttgcaagttcaggtgaatgaaaaagccggagtcacatattccgccggtttaaaagcgattttaagacatgatcccgatatgatcatcttaggggaaatcagagatgccgaaacggctgaaatcgcagtccgcgcggccatgacgggacacctcgttctttcaagcctgcatacaagagatgctaagggcgccatatacaggctgctggagtttggggtgaacatgacagaaattgaacaaaccgtcattgccattgccgctcagcgtctggttgatttaacatgtccgttctgcaaagaggaaaactgttccgtgtactgccggatgtacaggcagacccgccgtgcgggcatttatgaactgctctacgggaaaaacctcacccaatgctttcaggaagcaaagggagagcacgccaattttcaatatcagacgctccgcaggctgatcagaaaaggaatcgcgctcggctatgtcacaaccgacaattacgatcggtgggtgtatcatgaagcggattaaacgaacctggccgttgaaggatcaagcggcttttttgaaaaggctcggtgaaatgacggaaaaaggatacagtctgattgaagggctcagactgctgaaactccagctgcataaacgtcagcttgcagagctgacggacggaatccgcaggctgagggaaggtgatgcgttttacgaagtgcttgaggcactgtcttttcataaagaagccgtctctatctgctatttcgcggagaaacacggagaattgccgggggcgatgaaacaaagcggcgatttgttacagagaaagctcatgcagacgaatcaaatcaaaaaaatgctccggtatccgatgtttttaatttcttccgtctgtgtcatgttttatatcctgcaaagtttaattattccgcagttttctgggatttatcaatcaatgaatatgaatacatccggtgcgactgctttcatctttgcattttttcggcattttcatgaagcctgcgcactggcgctgtccgccgctttctgcttgtttttgtacgtttggttcttatgtaagaaaaaatccccgcaagataaaatgctcattgttgtgaaaatacccctcttgggaaaagcggccgttctttttaacagctactttttctctttacagctcagcagtcttctgaaatccggcctttctatctatgacagcttaacagcttttaaagaacaatcttttctgcctttttatcgtgaagaagcagagatgctcattacacgtctgaaagccggagaaaccatagaatccgctctttccgggcatccgtgttatgaaaaagatcttgcggctgcagtcagccacggacaggcaaacggcctgcttcaccgcgaactttatacgtacagccagtttatgatggagcgtcttgaacaaaacgcggcgaagtataccggcattctccagcctgtcatttacggtgttgtggccggtatgattttaattgtctacatgtcaatgctgatgccgatgtaccagatgatgaaccaaatgtaagggagtgcttcgtctgaaaaatcaagatgggtttactttaattgaaatgctgatcgttttatttatcgtttccattctgcttttaatcaccattcctaacgttacaaaacataatcaaagcattcagcataaaggctgtgaaggactgcagaatatggtgaaagcccaagtgacggcgtacgaaatcgaccatgaaggtaaaatgccggatatgaacgatttacaatcagaggggtatatcaaaaagaatacagcctgcccgaatggtaaacagatcttaattagtggcggagaagttacagttgaacaataacaggcggacagaaaacgggtttacccttcttgaaagcctgattgtgttaagcctggcgtccgtcctgctgacggttttgttcacgacggttccgccggtctgcacccaccttgccgtgcggcaaaaaacagaacagcttcaaaaagatattcagcttgcgcaggaaacggctatcgcagaacataaaagaacaaaaatcacttttcttccaagagagcataaatacaaactgcagtcagccggaaggattgtcgagcgttcttttgattcgcttcacattacacttgtgactttaccggagagccttgaatttaacgaaaaaggccatccgaattcgggaggaaagattcgattgaagagcgccgggttcacctatgagatcacagtttacttagggagcggaaatgtccatgctaaacggaaataaagggttctctactattgaaacactatcagcaatggccatttggctgttccttatgacgtctatcattccggtctggacaggcatgctgacagatggtctgaaaatagaagatcgccaggaagcgtatcagcttcttcagaaacatatcagcacttatatgatgaccggaaaaaagccgccgtctcccggtgtgaagtggaagggggatggtgagtattacaaagtgtgtgcggctgaccgcggcgaaaaagaaatgtgcctcagcattctcaaaacagactggctttacgcttcttaatgttttgttctccttggcagtctgtcttttcctatcaggcaccctgggcccgattttacatctgtttttatcaaaccggaccgataacggcggattagacagccgggagcatcaaattgccgttcagcagatcatgaacgaatgtaaacaggctgagactgtgaagccggcggacggcggattggcgttagcatgccggaaaacagggggcgaagaagtgcgttttgaaatttatcataagatgataaggaaaagagtaaacggaaaaggccacgtgccgatcctgcaaaacgcggcatcattaacggctgatgtgaaaaacggcctgctcttattagagatctcaagcgttacaggtaaaaagaatcaggcggtcattccggtttacagctctttaaaaggtgattaaatgtacaaatctgacggttttatctatcccgcggttctgtttgtttctgccgcagttttacttgtcatcagctatacttcatctgatttcatcacccgaaaaacatttgcgaaagaggccggggagtactggatcggagagaatctgctccaaaacggcgcgctgctgtcaagccgccatatgacacagggacaaaaggtccaaactggtacacagcgttttccgtacggaactgtttccttccgcatcaccgggagtaatcgccgggaaacggttcaggttacaattcaggccgaaacagtgtcaggcacgagacgggaggctcaccttttgttcgatcagaagaagaaacagctgattcaatggacggaagtataaaaaagaggcggcgggacaacacttcatagtaaagacagcactatgaggtgagagccgtgaaaacaaatgattatgtaaaatatatgactgagcaattcgttaaatatttcgatacgccgaaacaggaacggagagagcgaaaagaagtgcggaaagaaaagaaagtgccggcttctcagcactggttcggaatattgccgtacagttttaagctgtggatgcagcggaaaaaataaagcgaatcacacataaggtcctcctgtatcaggagggccttattggtattcctcaatgacggcaattttatttaccttttggctgtagggattaaaagaaatcgtaacaaacacaccaaattcttttgcgccatcccgcaatgtcaagtggtattgtttgactgcttcgtccgttcttttccggtcccacaccttttgaataaataacgtttgggcgagcggatatctttttttagcttctttttctgctaacttttcccattttgatttatggtgaacagcataataaggcaccgtttccgcctgagctgttcctgaaaccccgaaaacaagaagagaaaggcaaatcagactttgtgtgatcatcattcttcgtcctttcgctgtatatactttccattttgtgctaggcacctcgttattttctcacgttttattagaaaaaattccaaaaaggtgtgtaatttgaagcaaaacgatgtttttgaaagataccattctcaaaaacgaacaaattgaccgattttgacatttttcaagacgataatccttgattatactttgttcatgaagttctttaaagagaacggttgtcatatttattaacagttttacagggggtaaggcatgttccgattgttgcgaatggaaaaaaagggcaaggtgagatggcggatgatgctatttttacggctttcgttcattttttgcctgtccgtgacgatatgtgctcagttcacaggtgatacaagttcctccttcaatgatgtgaaaagcttcagtctcccggttcaaacgtgcggagattttcaatatacggatgacgattgccgttatgacgaacgctgggatcagagtgatttacatataacaaatcaaactgatacgtcaggcaccgtgtgtgcgccgcttcaactctatgccgagctggagaataagggaaaagagcggactgtttctgactggaaatgggagctccataaaatcacttctcagcagcagcctttacgaaacggcaatgttgtggataaagggcttattactgataaaaaaagcaaaacgatttataaaattgagtcaaagcggtctttgcagccgggcatatacgcattcaagatttacaagcctgaagggtatccggcggacgaagaacaatttgagtggtcaaaaccgatgaaactcgtcaaatgccgggaacaggcaaccgtttccgatctgaagaaaacggagaaagagccggctgagccggtaaaagaaagcggggaagaacatgaaaaaaacgctgaaactgatcagtaatattttgtatgccgtcatcttcagcctgattattgtgctgacgttaacggtgatttcgacccgggcttccgggggtgagccggccatcttcggctatacgctgaaatccgtgctgtcgggttcaatggacccggaatttaagacgggttcgctcatagcggtaaagaaaatttctgacgtaaatgacttaaaaaaaggggatgtgatcacctttacgcaagatgacggaacagccgtcacacacagaataatcgggatcacaaaaaaggacgggaacctgctgtttgagacaaaaggggaccataatgccgccccggatgccgcccccgttcaagctgaaaaagtggcggcccagtatacgggatatcagcttccgtatgcgggatatgtcatacatttggcaagccagccgatcggaacggcgattctgttaatcgttcccggcgtcatgcttttgatttactcaataacagtcatcgtcagcgccctccgcgatattgagcggaaaacgaaagcgctggaagaacatgcgaaaaagagaaccatctccacatgaatacggttgcaacctggcgacaggatttgataacaaaaaataaaaagtaaggggagtacaaacatgggtatgaaaaagaaattaagcttgggcgttgcctctgccgcactcggtttagcattagtaggaggaggcacatgggccgcatttaatgatgtgaagtcgacggacgctacatttgcgtcaggaacacttgatttatcggctaaagaacaatcagccaatgtcaatttgtcaaacttaaaaccaggtgataaattgacgaaagattttgaattcagaaacaacggttcacttgccattaaagaagtgctgatggctttgaattttactgactttaaaggagcaaagaaaggcaatgaatctgcggaggatttcctcagccagtttgaaattacggttctgacagtcggtaaagaagggggcaacggctatcctaaaaatatcattttaaaggcggccagcctgaaagacttatacttaatgtcaacaaagcaggataaagcagctgccgaagcgatcagcaagcacattgatccgaaattcctgagcgagagcggaaaagtcaatgtggcaaccattaacggcaaaacagctcctgagtacgacggagttccgaaaacgcctgctgattatgaccaggtgagaatggaaatccaatttaaaaatgacaccgcaaaaactgcggacggattaagtgtgcaaaacaagttccaaggcaatgcgatttctcttcaattctcttttgaagccacgcaatggaacggcttgaccattaagaaagatcatacggataaagacggttacgtcaaagaaaatgaaaaggctcacagtgaggataaaaactaatccgaaagtcggacagttaaaagaggagttgtgcacatatggcggcactactcctctttttgcgcttttctccatttttgataatctaaaaattcacgaaattgtttttttgataccccggatgtcatcgcatcgcgaactaatttctcccattcactatctaattgaccatcgtattcggtttcatgtttttcatcaagtaaagtatgaaccgagacgtccagaacagcggagactttttcgagaaattgaatggaggggttcgtctgtaaatttcgttctattgagcttaaataagacttcgctaccccagctttttcagctagttctgatagtgagtagcctttttcttttcggtattgtttaatacgctggccaatcaatgtcatcaccttccttgtgatattatagcacattcagaaaggatttacggtatgacttctggctgcctggatatgttgagaagactttttatgcgaaagcaggtatttgcgtatttcttctaggctgatatttgctttttgggcttctaatatcagctcaacccattccttatctaattgcgaaaattccatttttgcatttttcatgcattttctcctcctaaaatacttgtttatgtatttcagccaatccgcccatgaccttatctttacatgtctggaagtgattcatcgcatgcgaaacgccagaaattttttctatatacttttattataatatagaatttccagaaaaaacgggaaaggtgtcgaatggataacgcttatccagaaaaattactttgcaggaaaaataaaccgccgttttcaatctgaatgtgaattttcggctgatataaggctttcagcgcttgtttttccaaatggtattcctcaggtttttcttctgtctgctcataaaactgatcgagcagcctgaggtcctttttccatctggcgatcgcgctgtcagcccagtctgacggctctttggcggcagcgtcttttaagtaatgctccatccttttaatcccgctttccggcttaatcatcggcgatatggtaaagcaatagtctgatatttgcgaggtcagcggaagcggtgcaagcttctgctgaaacccttctataattgttccagaaacaagatgcaggcctaaagacaaaagtctgtcttttttcatgtcggattggtatgaaatcactacatttaatccaagccagggctgaagcggcactctggctccggctgatacaattttctcatatattcttgtaaatctcccattttgtttaactgcttgaaagatttgaaagaggcgcggggctccaaagtaaataaactcgccgtccatatcctccggagccgtttctttatcagtgatgaacgtaatcttcatcgggttcggttcgccgcccgttttttcacgccaatgccaataaaacgggcggttcataatttgtttgtccatctcgaccgtcaactgaaccgtcataaaacccggcccgtgttctgtaatcgggcagtggttcgcttcaaaaaagcgcagtaaaaattggtgaacctcctgctgtctcatgtcgcgcttcctcctttttaagagcctttttttctggcgggcttttccgtaccgtacgacagaaaagaggtgagattgtccattttgattctcatttcctcctctgtcagcgaatggcataaaatatcatgcaaatggtcttcaaaattgctcactttgatttttgttaaaatgtcatctaattctccgacgacattttcaaataaatgaattttgtcatacagaagttttaagatatgctcttccaccgtatgttttgtcgccatattgtagatatggacatctctttcctgaccgagtctgtgaatccttccgattctttgttcaagccgcatcgggttccacgggaggtcataattgataatatggttgcagaattgcaggttgatcccttcgcctccggcttctgtagcgatcagcacctgcactttgccgcggaaaagatccttcatccagtctttttttccgcgtttaaatccgcctctgaacggaacggagcttatgccgttctgctgaaggaaccattgcaggtaaatctgtgtcgccctgtattcagtaaaaataatgactttatcattaatcttttggatcaagtcaacaacttgaatcgcttttgagttttgcgtgacttgattgatgcggtccattaaattagcgatcgtctgttcatcgaatgcgggcgcttgtttgtctttttggtcaagcatttttttgagcgtcatatacacggcttccctgcttgaacagcactctctttgcagcgtcataatggaaaatgcgcttgcgggcttttccgtgccgtttttcagtgcggcaatgtcatcgtaaagcgcctgttccgtcggtgaaaaggtgatcggcactgtttccacgtggcgcttcgtccatgtaaggccggtgtcgctccgcgtgttgcggatcatcaccttattgacgagttctttcaaatgctcatgagcgtcaatcccgtccttctgattgaaggtttcttgaaatccgctttcatttcctaaatggccgggctttaacagtgacactaaattgaagatttcttcgatccggttttgaatcggcgtcgccgtcagaagcaggcagtatttcttcacaagacttctcgcaaattcataatttttcgttttgctgtttttgagcttgtgcgcctcgtcaataatgacgagatcatacggaatagaaaggacaatgtctttgtgaggggagcgtttggccgtatcaatagaagaaacgacgatatcgcactgttcccacacatagcttttcttctgttcaacagcgggtattaaaaacttctcctgaagctctttcacccactgggaaacgagtgatgccggcacaagaatcaggatttttttggccagcccgcgaatcatatattcttttaaaatcaggcccgcttccaccgtttttccgagccccacttcatcagccaaaatcgccttgccgttcattttttcaacgactttctgcgcgacctcaagctgatggggaagcggagtgaaatcgggcaggtataaaggagctctcaacccttcaaattcaggaatggcaagggtctgctggacttcagccgacagtttgtacagctcccaatttgaccagggaccgtccgttttcagccgctcagaaaactctcccggccagtttgcatcaaatatgatctctgctgtcatatgtaacaaaaccgcctttcttttaaaaaactgatttatcataatttttgttgccggacgtaaatgagggtggtaggatataagtaatgatttcactaaaagatattgctttagtatgtccataaaattggtaaatatgagcgaatgacagcaaggggagagactcggacgaaagatgggcgtccgggcgccgaaggagcaaactgcggagtgaatctctcaggcaaaagaactcttgctcgacgcaactctggagagtgtctgcacttagaagaagcaggccaccaaaggggacgtctttatgatatgttcataaagtaaactttcaggtgccgggacagagaaaccttcattttcatgaggtgtttctctgtccttttttatatgtttttacaagcgccaatgactgaagggggaagatgatgctgaaacgaacaccgctttatgatgtgtataaagaatacggcggaaaaacgattgattttggaggatgggagctgccggttcaattttcttctattaaagaggagcatgaagccgtccgcacaaaagcgggcctgtttgatgtgtctcatatgggggaagttgaagtatccggtaaagacgccctgtcttttctgcaaaaaatgatgacaaatgacgttgccgatttaaagccgggaaacgcgctttataccgccatgtgctatcctgacggcggtacggtcgatgatttgctgatctatcagaaaagcgagagctgctatctgctcgtgataaacgcgtctaatattgaaaaagacatcgcctggctgacagaacatgcggaaggagatgtcacgctgacgaatcagtctgacgggatttcactgcttgccgttcaggggccgaatgctcagtcggttcttgcgaagctgactgaatgtgatctgtcctccttaaagccgtttgcatttattgacgaggcggacgttgccggacgccaagtcctgctttcaagaacaggctataccggtgaagacgggtttgagttatattgccgcaatgaagatgcggttcatctatttaaggagatacttgcagcgggagagcatgaaggcctcgttccgtgcggcctcggcgcccgtgatacgctgagatttgaagcgaagcttgctttatacggtcaggaattgacgaaagatattacaccgattgaagccggaatcggatttgccgtgaaacacaagaaagattccgattttttcgggaaatctgtattgcgtgaacagaaagaaaaaggagccccgcgaaagctggtcggacttgagatgattgaaaaagggattccgagacacgggtacgccgtgaaaaaagacggtgttccgatcggggaagtcacgacaggcacgcaatctccgactttaaagaaaaatatcggccttgccttaatcaaaacggaattcagtgaagtcggaacggaagtagaagtggaaatccgtaaaaaaacggtaaaagcgaagatagtccgcacaccgttttataaacgtccaaaacagagctgaaaaaggagagtcatatgaagcatcgatatttgcccgcgacagaacaggataaaaaagaaatgctgaaagccatcggcgcagaaacaattgatgaactgtttgccgatattccggaagatgtgaggtttcaaaaagactaccaaattaaaaaagcaaaatctgaaacggagctgacgagagagctgacaaagcttgcggcgaaaaataaggacgctgttacatatgcgtcttttctgggcgcaggagtgtacgatcactaccagccggtcatcgtcgatcatgtgatatcccgatcagagttttacacggcatatacgccttatcagcctgaaatttcacaaggggagctgcaggcgatttttgaatttcaaacgatgatctgtgaattaacgggaatggatatcgcaaactcctctatgtacgacgggggaacggcgcttgcggaagcggcgatgcttgcgtcgggacatacgaaaaagaaaaaaatcattatttccgcagccgttcatccggaatcacgggatgttttgaaaacatacgcaaagggccaatatattgaggttgtagaggtgcccgcgaaaaacggcgtcacagatcttgaagcattggaacatgccgtttgtgatgagacggccgccgtgatcgttcagtatccgaacttcttcggacaaatcgagccgttaaaggacattgagccgctcgcacataaaggaaacagccagctgattgtttcttcaaacccgctcgcgctcggtattttgacaccgcccggggcatacggagctgatattgtcgtcggagacgcgcagcctttcggcatacctgcggcgttcggcggcccgcactgcggctattttgcagtaacgaaaaaactgatgagaaaggtgccgggccggcttgtcggccaaacagaggatgaaaacgggcgaagaggttttgttctcacccttcaggcgcgcgagcagcatatcagaagagacaaagccacgtctaacatttgttcaaatcaggcgctgaatgctttagcggcttcagtcgcgatgacggcgctcggaaaaaacggcgtcaaagacatggcccgccaaaatatattgaaagctgattacgcgagacgccaagcggaaaaagccggcttgcacgtagcatttgacggcccgatatttaatgaatttgccgtcaggctgaatcttcccgtcaaggaagcaaaccggcggctcctgcaagacggcatcatcggcggatatgacttaggtcttgcgtatccggaactggatcagcatatgctgattgccgtcacagagctgagaacgaaagaagagatcgattcgcttattgcgggattgggggatcaacatgaataatcaagatcaggcgcttatttttgaaatgtcccgcgaagggcgtgtcggttacagccttccggagcttgatgtgccggaaacagagcttgaaagccttcttcccggtgactatatccgcgatgaagacgcaaagctgccggaagtatcagagcttgatattatgcggcattataccgctctttctaagagaaaccacggagttgattcaggcttttatccgctcggctcctgtacgatgaaatacaatccgaaattaaatgaaaaaattgcccggttcgcaggtttctccgctattcatccgcttcaggacgaggacacggttcagggggcgcttgagcttttatacgatttaagcggacacttggaggagattacgggcatggacgaggtgacgctacagcctgcggcgggcgctcacggcgaatggaccggcctgatgatgatccgcgcctaccacgaagcgcggggagacttcggacggacgaaggtgattgtccctgattcagcccacggtacgaatccggcatccgccacggtcgccggttttgaaacgattaccgttaagtcaaatgagcacgggctggttgacattgaagatttgaaaagagcggtaaacgaagaaacagcggcgctgatgctgacgaatccgaacaccctcgggttatttgaagaaaacattacggaaatggctgaaatcgtccatcaggccggcggaaagctttattatgacggagcgaatttaaatgccgttttaagtaaagcaagaccgggagatatgggatttgacgtcgttcaccttaatctgcataaaacatttaccgggccgcacggcgggggaggaccgggctcagggccagtcggagtgaaaaaagaattcattccgtatctgccgaaacccgttctcacgaaaaaagagggccgtttgacttttgactatgaccggccgcagtcgatcgggcgcgtaaaaccttattacggcaacttcggcattaatgtcagagcctacacgtatatccgttccatggggcctgacggcttaaaagctgtgaccgaaaacgcggttttaaatgcaaattatatgatgagaagactcgcgccttattatgatctcccgtttgaccgtcattgcaagcatgaatttgtgttatcgggaagaaggcagaaaaagctcggcgtaagaacgcttgatattgccaaacggcttttggatttcggctatcatccgccgactgtgtattttcctctcaatgttgaagaaagcatcatgatcgaaccgacggaaacggaatcgaaggaaacgcttgatgcgtttatagatgccatgattcaaattgcgcgggaagcggaggaatcgcctgaaatcgttcaggaggcgccgcatacaacagttgtcaaaagaatggatgaaaccaaggcggctagaaagccggttttaaaatacgaacgtacacctgacgtcagccgctgacacggtataaaaaaagagcttccgtataaaacggacagctcttttttcatgattagttttttgctttaatttttccgccccattttttaaatccgcctttcaggttgtaaatatctttgcagccgtgtttgcggagcgtctgtgccgcgcgtccgctgcggacattgttttggcagtacagataaacgggtttatcaggacggatttcacttttgcgctgtttcagctgtgacagcggaatgttgcgcgcgccgagaatatgaccgccttcaaattcattcggttcacggacgtcaatcagctgcgcttttctgtagcccgcgcggaattcctcttccgtaagtgttttcattaaacgctgctggtaaaagtacgaaacgatcatataaacgataaacgccgcaacaataattaaagcaatcatattagacaatgcaattctactcctttagcttataaaatcaaaaccctgcttcctgaaaacaaggcttaccggacgttttgggacaaatactattatagtaaagcatgaagcgattgtcatccttaatgaaacgaaatatttttcattttcaaggcagtttgttaaactggttttattaaaacgataaagaagggttcagtgtatggaaaaagaaacatggcggtttattgactcagggaatgaaagcccggcatttaacatggcgctggatgaagcgcttttatattggcacagccaaaaaaaaattcctccggtgatccgtttttacggctggaatccggcaactttgtctgtcgggtattttcaaaatattaagaaggaaattaactttgacgcagtacataaacacggcctcgggtttgtcagaagaccgacaggcggacggggtgttctgcatgataaagaattgacatacagcgtaatcgtttcagaggatcacccggaaatgccggccacggtgacagaggcgtaccgggtgatttcagaaggtattctgcagggattcagaaaccttggacttgatgcctgctttgcgattccgcgaacggagaaagaaaaagaaagcttgaaaaatccgcgctcgtccgtctgctttgatgccccttcgtggtatgagctggtcgtcgaaggacggaaagttgccggaagcgcacagacacgccaaaaaggcgtcattcttcagcacggttccatcctgcttgacattgatgaggataagctgtttgatctgtttttatatccgagcgacagagtccgtgagcgcatgcagcggaatttcaaaaacaaagcggtagccatcaacgccttaacgccgaaacgggtaacgatggatgaggccagaatcgcttttaaagccggttttgaggaagggctgaacattcatcttgagccttacacactcacgtctgaagagcttgcatttgtcaatgagctggctgagacgaaatacgcgtctgatgaatggaattataagcgctgataaggcttgacagaccggaagcatccttgttttttcatgaccgttagtgtaaacttgtaatggtttataaagttaaggtgctttttgggagggttacttatgacaacaccaagtatggaagattatattgaacagatttatatgctgatagaagaaaaaggatatgcacgggtttctgatatcgcggaagctttggcagtccacccctcctctgtaacgaaaatggttcaaaaactagataaagacgagtatttgatttatgaaaaatatcgcgggctcgtattgacgtcaaaaggcaaaaagatcggcaaacggctcgtatacagacacgaattgcttgagcagtttttaagaatcattggtgttgatgaagagaagatttacaatgatgttgaaggaatcgaacatcatctgagctggaacagcattgaccgcatcggcgacctcgttcagtattttgaagatgacgaaagccggaaaaaagaattgaaatccgtacagaaaaaaaccgaaaatcccggtgaataaagggcagcccgaaatggggcgccctttttttaatgtcttcattctttggtctatttcgcccagccgtttcttaaaataataatacaccttgagatggaagggagagggcgcgctatgcagattgacggcgtattttcgggcggggggataaaaggggtggcgcttgccggcgcttatgaagcgctggaagaaaagggctttcgctttgaaaggctcgccggaacaagcgccggcgcgattattgccgcatttatcgctgcgggctatacgagcagagaggttcattccatcatagatgaggtggacggaaggcaattgcttgatcagagatactcattcctcccgctgaaaatcctgcagtgggtgtcgatatattggcgcctcggactatacagaggcgatatgctggaaaagtggattgcggataaattaaaagcgaagggcatcatcgcgttcggcgatttgaaaaaaggctcgctccgtctcatcgcttcagatctgacgaacggaacgatgatcgtgcttcctgacgatcttccccgctacggattaaatccggagatgttcccggttgccagagccgtcagaatgagctgcagcattccttatttttttgaaccgataaaactgaagaccgaaaaaggcacctcaacggtcgttgacggcggcgtgttaagcaatttcccgatttggctgtattcaaaagaacgcaaacggccggtcatcggaatttcgctttcgcccaacgaaaaagagcgcccgaaaaaatcaatccgcaacgcttttgagctgttcggggctttgtttgaaacgatgaaagacgctcatgatgccaggcatatcgcgacaaagtacgaacagaatattatttttattccggtggaacatgtgatggcgacggagtttcatctcacaccgcaaaaaaaactagctctcattgagctaggaaaaagcagaacagagcaatttttgaagcaatggagctattaaaaaagcgctctgtttttctttttattctttttgccttctatgacggtaagctgggtctggctttttttcttaagaatcatcggcttcggtctgctgctgctcggcacgctccgcaaatggctgacccggcctctgtgtccggcgcggtgcttcgctttttgctccttcattcggagccgcgattgtctggccgcttttttgaaagcggttccgtcacggccggtgcgtcggttcaggaccgtcctcacgataaaataaataataatgcctgcgataataacggtgattgctcttgaaatcatctgcccggggttggttaccgccgcataaatgaaaccgaatgcgccaagcgctatcaatacagcaaaaaaaggttgtacacgatgattcataactgcccacctccaaaataataacggtaacggttcagattacgttgtgagacggattttcgctctgttctgaaatgtcttccagtctgagaagctcgttaaagctttctatggcaacctcgacctggtcatccgccggttcctttgtcgttaaaagctgcagccacaggccgggataaccgagcactttcaaaacggggatattccgtactctgttcgtcagctggagcacttcaaaggagatgccgagaacgaccggtataagcgcaatcctgtctaaaatccgcacccaaagcggatctgtcggaacgagtaaatagacgaacatgccgacaatgatcgtaaataaaataaagcttgaaccgcaacggtaatgaagccgtgactgtttctgaacattttctattgtaattggcaaattctgttcataacagtttatgaccttatgttcggctccatgatattgaaacactcttttaattaacggcgtcattgataaaaaataaatgtagccgagaagcagaatcagcttaaacagactttcgattccgatctgcgcggcgtctgaggaaaatacgggccttacaagctccgctaagaagaccgggacgagcgtaaaaacgaatttgctgaacaaaaacgacagaacgccgatcaccgccaggctgaaaaacatcgataagccggaacccttcttctcttcctgctccagcttggcgtcatcctgaggatcaagcccgtaacgttcgctggaaaagtttaaatgctttgtgccgttggcgctcgcctcaatgatggcgacaattccccgcaaaaaaggaatcttttttaaagccgaaagcttggcgttcggcactctcggaagcttgaaaaaatcaatgcttccgtcattcctgcggatggcggtaacataattttttctgccgccgaacattaccccttcaacgacagcctgcccgccgtatgcagggggcgttttttgtttggacattgtttatcaacctgcctgttttcttaggatttactaaccatttcctttcactctattgtacaggaaaccgcggtaaacctctagttagacagccggaaaatcaatgctttttctacatgcagtataccccgtttctttagattttactcattgaatgaaaatatggcgcagctttttatgacttttcaatttttgggcagtctatgactggaggtgccatgatgacaagcgaaaaacattcagaacaggaagaaaaaaagaagcaggatgatgatcagcagcctgtttcatttaccggcagaatttgcggtatcggatttgccggcggtgtattttggagtttgatcggctatctcgggtatgtctttcatttttcagagatcagccccaacatgattcttcagccgtttatgatcggagaatggaaaaaacaatggctgggcacgatggtcagcatcgttgtcatcggattcatttcaattgccggggcgtttatttatttcgtctgcctgaagcgttttaaaaccatgtggccggggatggtgtacggcgtcattttatggtgtgcggtttttttcttattcaatccgattttcgaagatgtgaaatccgtcactgaattgaaatcagatacaatcgtgacgacgctttgcctttacattctgtacggtttgtttgtcggctactcaatttccttcaactacaatgaacttacgtcagacaagcttgcaagggcgctcggcaacaagtgaataagtgtataatccctgtccggtatggtaaaatgttcacgagaagtgaacattttttatgctgaaaaccgggcagggatgctcccgcgttgtcaggcggcagtcaagaatcggcgaggaggagaaagggaatgaaacttgagaaattgcgaaatcttttcggtcagctggatatagacggaatgttggtgacaagctccgccaatctgcagtacatgacgggatttacgggttcgtcaggccttgcggtcatatcgaaagaacgtgcggcatttatcacggatttccgttacaccgagcaggcgaagacgcaagtgaagggttttgacattatcgagcacggcggaagcttaatccaaacggctgcggatacgattcttgagtacggcattaaaaaactcggcttcgagcaaaacagcatgacgtacggaacatatgcatcctaccaagcggtgctgcaggaagcggagatggttcccgtcgcggattccgttgaaaagttgcgcttgattaagtcaagtgaagagattaagatattagaggaagctgcgaagattgcggatgatgcgtttgaacatattctgacgtttatcaaaccgggcatctcagagatttcagttgcaaacgagcttgaattttatatgagacgtcaaggagcagacggctcttcctttgatatgatcgtcgcctcgggagtcagatccagccttccccacggagtggcaagcggcaaattgattgaaaagggagacttggtcacgctcgatttcggcgcttattataaaggctattgttctgatatcacacgcaccgtcgcggtcggagagccaagtgataaactgaaagagatttatcaggtcgtatacgatgcccaagcgcttggtgtcctgcatattaaacccggcatgacgggaaaagaagcggatgccctgacgagggatcatatcaccgcaaaaggctacggacagtatttcggccattcgacaggacacgggttcggaatggaagtccatgaatcaccggggctgtctttcaggtcatcggccgttcttgagccgggcatggcggtaacggttgagccgggcatatacataccggaagtcgggggcgcaagaatcgaagatgatatcatcatcactgaggacggcaaccggacaattacgcattcccctaaagaattaattattttgtgatcggagtataggaggacatcaaacatgatttcagttaacgattttcgtacaggactaacgattgaagtagacggcggcatttggcgcgtcgttgactttcagcacgtaaaaccgggaaaaggagcggcatttgtccgttctaaattgcgtaacctgcgcacgggcgctattcaggagaaaacattccgtgcaggtgaaaaagtcgcgaaagctcaaatcgaaacaaaaacgatgcagtatctttatgccaacggcgatcagcacgtgttcatggatacaagctcatatgaacagcttgaattgaacgaaaaccaaatcgaagaagaattgaaataccttctggaaaatatgtctgtgcatatcatgatgtatcagtctgaaacgctcggtattgaactgccgaacacagttgaactgaaagttgttgaaacagagccgggaattaaaggcgacacggcgtcaggcggcacgaaacctgccaaaacggaaacaggccttgtcgtaaacgtaccgttcttcgtgaacgaaggcgatacgctggttgtaaatacatcagacggttcttacgtgtcaagagcgtagttaaagaaattcggagtctgctccttttacggggcaggcttttttttgcgttctgcctcagaatctttcttctatatgaaaatagtgagactacttccgtgagctagagcatatagtgtaacaaaatgcttgaagttgggggattgcaatgaaatttttgttcggttcaatcaattctactgttttaacgatggccggtttacgagttttgtcctcgctcattgaattatctgccgctattatcatgcttttgacaaacgacatcagaaaagcggttgtggtgaatagtattttggcaatcgtcggccctctgatctttatcatcacaatgacgatcggcatttatcagattgccggacagctctcatatgcaaaattaatattgatttttgcgggtgtggtgctgattttggccggtgtgcataaatagagggccggggtgtcataaagtctgtcccggatcatacattttaaagaagccaatcggtaaaaaggaggggactctattgaatgaaattacagaggttctccctgaattattgagagatgccatctccgccgtgcccgaagaagcgaggcgggatacagaagaaatcagaatccgggtcgacaggccggttgaactgatccaaaaaggacaacctttgtatttgtcatatgtgtgtacggccggcgacgcacagctgatcctcagccggctcagcaactatagtatgtacacgctggaagaagagctgaaaaaaggatacatcacaatcagaggaggccaccgtgtggggctggccggaagagtcatcgtcgaaaacggagccgtcaaaggactccgggatattacttcttttaatatccgaatcgcccgggagaagctggggatcgcagaaccgctcattcctttcttatggaaagaaaactggctgaacacgctgatcatcggtcctccgcaaacggggaaaacgaccttgcttcgtgatttggcccggctttccagcaccggatcaaaacgcattccggcaaaaaagacaggtatcgtagatgaacggtcggaaattgccggctgcctgcggggcattccccagcacagtttcggccgcagagtcgatgtccttgatgcctgtccgaaggcggaagggctgatgatgatgatccgttctatgagtcctgatgtcataattgtggatgaaatcgggagaatggaagactcacaagcgctgctggaggcgctccatgcgggcgtatccgttatcgtctctgcgcacggatggaatatgaaagacttggtcaagaggccgtcgctgaaaatgctttgggaggaaaacgtgtttgaccggtatgttgaactgtcaagacgccgcggtccgggaacgatcagcaggatgtacggaaaggacgggaaacctgttccgcatgctgaaagcgtgatgacatgctgaagcttttgggtgccgtgttcattctgacagcgacgacatggacgggatttgagatcgccaaaatgtatattgaaaggccgagacagatccgtcagctgcgcgcggcgctgcaatcgcttgaagcggaaatcatgttcgggcatacgccgctgcacatagcttcgggacaaatcgccgcacagctttccaagcctgtatcgtcattgtttcaagctttcagcaggaggcttgagcagggaagcgattccgccaaaacggcctgggaacagagcttgaaacataactggccctccatggcgatgaaaaaaagcgaatacgatgtgctgaagcaattcggagagacgctcgggctccatgaccgtgtttctcagcagaaacatatcaagcttgcgcttacacatttggaagcggcggaagcggatgccggacgggcgcaggcgaaaaatgaaaaaatggtgaaaagcttaggatttttagccggactgttactcattcttctattgatgtaaacatgaggggagcaaacataaaatgggagtcgacgtaaatgtcatttttcaaatcgccggagtcggtatcgtggttgcgtttctgcacaccatacttgaccaaatgggaaaaaaagaatacgcccaatgggtgacgctgcttggctttatctatattttatttatggtggcgacgattgtcgatgacctgttcaaaaagatcaaagctgtgtttctattccaaggataggggggcttacagattgagattgttcaaattgtaggtttaggcctgatcgccacatttctctccctgatcgtaaaagaacagaaaccgactttcgcgtttatgattgtcgtcttcagcggctgcgtgatctttctctatctcatcgatcagatttacgacattatcagaatgatagaaaaaatagccgtcaatgcaaatgtcaatatggtctatgtggaaaccattttaaaaattatcggcatcgcctacatcgctgaattcggtgcgcagctgacaaaggatgcgggccagggagcgattgcttcgaaaatagagctggccggaaaaattttgatactggtaatggccgtgccgatactcaccgtcattattgaaacgattctcggacttattccttcttgatcatcaataaaatggaaaggggggcacaaaaaatgaagcgctttcggtgggcgggggcttttttgttcatcctcttattttttcagactgaatgtgtacaagctgccggaacagacggtgcgtcgcaggaaaccgcagttcaccaagaatccgctgatgaagtggcgaaaaagcaggccgaagcgctgaaaacagaaggcatcggaaagttttgggacgacatcatgacagaatacggcggtcttctgcctgaaagccaaaagggaagcatcatcgactttattaacggtgaaaaaacgttctcgccggaggcatggctgaaggctttattttcatacttgtttcatgaagtgctcgcaaacggaaagcttctgggaactttgattcttctcaccattttttgtgtcattctgcagcttttgcaaaatgcgtttcagcagagcactgtcagcaaagtggcttatgcaatcgtctacatggtgctgattattctcgctttaaacagctttcatgttgccgtcaattatgccagtgaagcgatccagacgatgacaagtttcattctcgcgctcatcccgcttttactcgcgcttttggcgtcttccgggggagccgtctccgcagctttttttcaccccgttattttatttctgatgaatacgagcggccttctcattcaaaacattgtcatgccgcttattttcctgtcagcgattttaagcatcgtcagcacgatgacggatcaatataaagtcacgcagcttgccaatctgctcagaaatatcgcgatcggcgcgcttgccgtatttctcaccgtgtttctcggcgtcatctccgtacagggggcttcggctgccgtgacggacgggattacgctcaggactgcaaaatttatcacaggcaattttattcccgtgctcggccggatgtttacggatgcgacggatacggtcatcagcgcatcgctcctattaaaaaacaccgtgggaatcctaggagtcggaattttgatctgcatctccgcgtttccggcgatcaaagtgctctcgctcgcttttatttataagctcgcggccgctattctgcagccgctcggaggcgggcccgtcattacgtgcctcggcgtcatcagccgaagcgtgctgtatattttcgcggcgctcgccatcgtctctctcatgtttttcctcagtattacagtcattattacagcaggcaacctcaccatgatgatgaaataaaggaggcccattggatatgagctttttaacagaatggctgacaagcattattttgtttatcttattcgccatcgtcatcgacatgctgctgcccagctccagtatgcaaaaatacgccaagatggttgtcagcctgctgttaatcattgtcatgctcaacccgatcttcaaacttttcaaaacagacccggaaatcatcttcgattatttgacaaaacaagagcaatctcaatccgctgatataaaaaatcaaatcaaatcagaaaaaaaagaaatacaagcatcaaaccgcgcatatgttttagaagaaatggctgtccaactaaaaaagaaagcggaggagatgttcagtcatgacgaatacaaaatagacgacatccgccttacagcggaagaacaggttcgttcagaagaagatgtaaaaacgatcagcgtgtatatggccccatcttctgaaaaaaccgtgcaaaccgtcgcaccgatcgacatccgcacagaccgcaaatacgaaccggaaggcgcagccgaaaaaaaagaggccgcagacatcaaagaaaaacttgcggatatatgggaaatcggcagtgagaaaattacggtttatatggaaggcggggagaaaaacggccatgaataaaaacggactatggaccatactcaaaaaacagctgatgatcggacaggcgaaagacggagaaaaaccaaaactgacaaaatatcattactttctgttcgtgtttgtgctcggagtatcttttatgctggtgagccagctgttctcttcaccggagaaaaccgggaaggaccaagcggcgcagaccgtcatgtccggccgaacggaagacaaaagcgggcaaaaaagcgcacccgtttttaaggcatcgaaagacagcagcgccaaaaacacgatcgatgattatgaaagagactatgaaaaccagctgaaagaaatccttgaaacgattatcggcgtggaggatgtatcaattgtcgtgaacgtagacgcaacatctttgaaagtgtttgagaaaaataaaacgaaaaaagacaccaccaccgaagaaaccgataaagaaggcggcaaaagaagcgtaaccgatcaaacctctgaagaacaaattgtcatgattcgaaacggggatcaggaaaccccggtcgtcgtccagacgaaaaagcccgatatccgcggtgtactcgttgtcgctcagggagtggacaacgttcaaataaaaaaaaccatcattgatgccgtcacaagggtgcttgatgttccgagctaccgtgtagcggttgcccctaaaaaaatcaaggaggattcataaatcatgctgaaaaaacaaacggtttggcttttaacaatgctcagtctcgtcgtggtattaagtgtttattatattatgtcgccggaaagcaaaaatgccgtgcagatgaaaagcgaaaaaagcagcggagaagtggcaactgaaaaaacgccggctcctgaaacgaaagataagaacggaagcggcacggataaagaagacggaacaaaaggaacgaaagattctaaaggcgcaaaagaggataaagaaacatcagccgaagcatcggacaaagacggatcggtcgctacagaaacagctgatgaaaacttatttaccgcataccgcatggaacttgaagacgcaagaagcaaagaaagggaacagttaaacagcattgtttcaagcgatgatgcgaccgcaaaggaaaaaagcgaagcctacgataaaatgacggcgctgagcaatgctgaagggacggaaaaacagctggaaacgctgattaaaacacaaggctacaaagatgcgctcgtggatgctgaaggagacaaaatcaacattacggtcatgtctgacaaacattcaaacgcaaaagcttccgctatcattgacctggtggaaaaagaaatcaagacgatgaaagacgtcgccgtcacgtttgaaccgacaaaataagagatctccaccgcccgcacccgctgcgggcttttctgatgtcattttagatcagtgttgaatttacacaagcgctcctgtaagataaacatagtatgtacttttagtagcaacccataaatttctattttttatacataggagtggaaactgatgttaaaaatcaacgaaattcatgaactgataaaaagaatcgatgaatcttccatcgacgaattcgtttacgaaatcgaaggcgtaagcctcaaactgaaaaaaaatgaagcgccggcagtgaatgtaacgggacaagctcaagccgttcccgccgcttacgcacctgctccgcaggctgcaaaaccggaagcgcatgaagccgctcctgttcaggaagcgccgaaacaagacgaaaacctgcacaaaattacgtctccgatggtcggaacgttttatgcttcttcatcgccggaagccggcccttacgtaaaccaaggttcaaaagtgagcgaaaatacagttgtttgtatcgtagaagcaatgaaactctttaacgagattgaagccgaagtaaaaggagaaatcgttgaagtgttagttgaaaacggccagctggtcgaatacggacaacctctatttcttgtaaaagctgagtaaggagacctgctattatgattaaaaagctattgatcgccaaccgaggagaaatcgccgtcagaatcatccgggcctgcaaagagctgggcattgaaactgtagccgtttattctgaggcagataaagacgccctgcatgtccaaatggccgatgaggctttttgtatcgggccgaaaacatcaaaagaaagctatttaaatgtaacgaacatcgtcagcgtcgcaaagctgaccggcacggatgcgattcatccgggatacgggtttttagctgaaaacgccgactttgccgagctgtgcgaggaattgaacgtaacgtttgtcggccctacggctgacgccatttcaaaaatgggaacaaaagatatcgcgcgcgacacgatgcagctggctggtgtgccgattgtgcccggttcaaaaggaatcataaaaaataccgaagaagcggtttcgcttgcaggtgaaattgggtatcctgtgattataaaagccactgcgggcggaggcggaaaaggcatccgggtcgcacgcacagaagaagaactgatcaaaggcattgagattacccagcaggaagccgctacggcattcggaaatccgggtgtgtacatcgagaagtacatagaagatttccgccatgttgaaattcaggtgcttgcggataattacggaaacacgatccatctcggagagcgtgactgttctatccaaagacgtctgcaaaaacttcttgaagagtcaccgtcacctgcgcttgattctgaaatcagggagcagatgggcgaagctgcggtaaaagcagcgaaggccgtcggttacacgggagccggcacagtagaattcatttatgactacagagaacagcgctactacttcatggaaatgaacacgcgtattcaagtagagcaccctgtcacagaaatggtgacgggaacggatctgatcaaagaacagatcaaagtggcatccggacaggagctttcgctcagacaggaagacgttgaatttaacggctgggcgattgaatgccgcatcaatgctgaaaatcctgcgaaaaacttcatgccttcacccggtaaaattaacatgtacctgccgccgggcggactcggcgtacgcgtggattcagccgcatatcccggctattcgatcccgccgtactatgacagtatgattgctaaagtcatcacatacggaacaacgcgtgatgaggcagtcgcacggatgaaacgcgcgctgagcgaattcgtgattgaaggtattgaaacgacgattccgttccatctgaaactgcttgaacacgaaacatttgtcagcggagagtttaatacaaagtttttagaaacatatgatgtaatgggctcataatttttgcgggaggtgaattgaatggaagacaacagtgtgcttaaaatggatcatgacgaggctcatttaggcaaggttgaaattgctcctgaggtcattgaagtcattgccggcatcgccgcttccgaagttgaaggagttgctgaaatgcgcggcaatttcgccaccggcgtcgtagaacgcttcggcaaaatcaatcacggtaaaggcgtaaaggtcgatttagccgatgacgggattaccatcgacgtctattgcgtcgttcaattcgggatctcgatcccgaaagtggcggcaagcgttcaggagaatatccgccaaaccttattaaacatgacgtctctgaccattaatgaaatcaatattcatatcgtcggcattcaatttgacacgaaagcccaagaagtcgaaatcgacgaagaaatgtaatgagcgtataaaaaccaaggggatgggcagccctttggttttttatacgtttcccgtcatttcaggcatgaagaaagccggcttacaaacggcagccgagtttcttcatgctgtgaaatccgaatgaaattaatacggtttgtgaaaatattcggcattagggtgaaaaaacctaaatttcgacatgcgattgagaaaaaaatatgttatgatctctttaagcttaacgacaagcggataaagcggatctgaaggagaaagaaaatgaaaagaagaacagctagagaaaaagctttgcaggcactttttcagattgatgtcagcgatattgcaccgaacgaggccattgagcacgcgcttgatggtgaaaaaacagatgccttctttgaacagctggtgtacggagtgatcgaacatcaggttcagcttgatgaaatgatttccggccatctcgtcaattggaagcttgaccggattgcaaacgtagaccgcgcgatcctgcgtctggcggtgtatgaaatggtttatactgacgacattcctgctaacgtgtcattaaacgaagcaatcgagctggcaaaacggttcggcgacgataaagctgcaaaattcgtaaacggggttctttctaacattaaaactgatatcgaatcataggaggaaagaaaatgactgcaacaatcatcgacggaaaagaaacggctaaagaaaaacgcgaacaattggcaaaagaagtagaagagctgaaagcacaaggcgtagtgcccggtttggcggtcattttaatcggagacgatcccgcttctgtttcatatgtgacaggcaagaaaaaagccgctgaaacaatgggaatgaaatttaaacttgaccgctttgactcaagcttaaccgaggcggagcttttaacagtgattgatcagtataatcaaaatccggaattccacggcattctcgtccagctgccgcttccggatcatatttctgaaaaagccgtaatcgagcggatctctcccgataaggatgttgacggtttccaccctctcaacgtcgggaaaatgctgcttggcgaagatacatttctaccatgcacgccgcacggaattgtcgagttattgaaaaagacgaacgtagatctttccggcaaagaagttgttgtagtcggacgaagcaatattgtcggtaaaccggtcggccagctgctgctgaacgaaaacgcgaccgtcacatattgccattcccgtacgaaaaatatgtctgagcatacgaaaaaagcagatattcttgtggtagcggtcggtaaagcgaatttcatcaaagccgatcaaatcaaagagggcgccattgtcattgatgtcggcgtcaaccgtctcgaaagcggaaaactctgcggagacgttcagtttgatgaagcgaaagaaaaagcatctttcattacgccggtgccgggcggagtaggtccgatgaccatcacaatgcttgcgcataatactgttaaatctgccagacgtacgttatcatagataaccggagacagtcacaaaaagtgtgacaatgagcacgatacccgcttcttaaggctcctttcagccagagcgggttttcttagtttagggcaaaaagcctttatgaaaggagtgcaggatgtgagtgaagcggcatatgtcacggtttccgcgctgaccaaatacattaaacgaaaattcgatgtggaccctcatcttgaagacatttggattaagggtgagctctccaatgttaaaattcatacgagaggccacatctattttacattaaaagatgagcatgcccgcatgcaggccgtcatgtttcaaagacaaagttcgaggcttgcgtttaagcccgaggacggaatgaaggtcatcgtaagaggcggcatttccgtctatgaaccgagcggaagctatcagctgtacgcgaaagaaatgcagccggacggtgtgggggcgctctacttagcatatgaagaattaaagaaaaaacttgccggcgaagggttgtttgatgaccggcataagcaggccatccccgcttttccggctacgatcggggtcgtcacgtcaccgacgggagcagccgtcagagacgtcattaccacactcaaaagaagatacccccttgtgaaagtcattgtgcttcccgcgctggttcaaggtgaaaatgccagcagatcgattgtgaagcgcattgaagaagccaatgcacaaaaaatgtgtgacgtcctgatcgtcggaaggggagggggctcgatcgaagaattgtgggcatttaacgaagaaagcgtagcccgggcgatttttgcttccgccattccgattatatcagccgtcggacatgaaacggattttacaatcagtgatttcgtcgcggatatccgggcggcaacgccgacaggagcggcagaaattgccgtcccccatacgacggacttaatggaacggacaaaaacggcggaagtccggctgacaagagcgatgcagcagcatatcagcaagaaaaaagaacgggttctatcgctccagtcatcctacgcgttccgttttccgaaacgattgtatacccaaaaggaacagcagtttgatcttttgtatcagcagttccaatcacagctcacagggcttacggacaggaaacaaaggcagctggagcggaatacgtacagattaacggcgctccaccctgaaacccagctgaaacaggcgaaaaaacggtacgaggagcgctcaaatcagctcgcccgaagcatgaatgtccagctgaagcagcttcattcgcagtttcagacggttcttggtaaactgaatgcattaagtccccttcaggtgatggagagaggatacagtctggcctataaagataaagagctgatcaaaagcgttgatcaagtggaacaaaatgatacgcttgaagtaaagatgacagacggcgttctgacgtgtgaagtattgcaaaagagaggcgaacgaaaatgacagaaaccaaaaaaagtgaagagctgacatttgaagaggcgatgaaaggccttgaaggcattgtggcaaagcttgaagaaggagacgtgccgcttgagcaggcgattaattattttcaggaagggatggccctttcaaaaatgtgccatgaaaagcttcagcatgtcgaaaagcaaatggactttattttaaaagataacggcgaacttgcacctttcagcgttcaggaggaagacgaaggtgacaaataaactggacgcatttttagcatcgcgcaaaaaactgattgaacagcagctttctttgtatacggaacggcttgcgatgcctgaaatcctcaaaaaatctatgctgtattctttggaagcgggcggaaagaggctgcgccccctcgtcgtcttagccgttctgaatgcttacggaaaagatgaaaaagacgggattccggtcggatgcgctgtcgaaatgattcatacgtattccttaatccatgatgatcttccttgcatggacgatgatgatctgcgccggggaaagcccacaaaccataaagtcttcggagaagcggcagccgtattggccggagacgggcttctgacagaaagctttaaattgatcacatcccacgtgtctgaggcggtttcagcagaaaaacggctccgtctcgtcgatgagctgatcagcgcggcaggaacggaaggaatggtcggcgggcaggctgccgacatggaagcggaacaaaagcggataacgcttgaggagctggaatccatccacgagcggaaaacggccaagctcctcggtttttctgtgacggcgggcgccattttggcagatgcgccggaggatgaagtcgaaaagctgcgtctgttcagcagccatatcggcatcggatttcaaatcagagatgacatccttgatattgaagggcatgaggagaagatcggcaaaccggtcggctcagacacgtcgaatgaaaagtcaacgtatccgtcgcttttaacgcttgaaggcgcgaaagagaagctggcgtatcatatcagcgaggcgaaacggatcatcagcggcctttctcttcagaaagaactgctgcatgacctctgtgatttaatcgcggcgagagatcattaaaaacggtcctgatttgaaggggctgccgctcctatggtaaaatgtaagcagtttcgatgaaaatacaaagggagtctttttcttttttcaaaaagacactgtttaatttgcagaaattcatgctgaaagtgagttgatccgctttggatcttttatcaatacaggacccgtcatttcttaaaaagatgtcaattgaacagctggaagagctgagtgaggaaatccgcaatttcctcatcacatcgctgtctgcctctggcggccatatcgggccgaacctcggggttgtcgagctgacaattgcgcttcacaaagaatttgacagtccgaaagataaatttttatgggatgtcggacatcagtcctatgttcataaactgttaaccgggcgcggcaaggagtttgaaaccttgcgccaatataaagggctttgcggtttcccgaagcgcagcgaaagcgaacatgacgtatgggaaacaggccacagctcaacatcgctctcaggcgcgatgggaatggcagccgcccgtgatattaaaggatcgaaagaatatatcatcccgattatcggagacggcgctttaaccggaggaatggcgctcgaagcgctgaaccatatcggtgatgagaaaaaagatatgatcgtcatcctgaatgataatgagatgagcattgcgccgaatgtcggggcaattcattctatgctgggacggcttcgcacggccggcaaatatcaatgggtaaaagacgagcttgaatatttatttaagcgcatcccggccgtcggcggaaaattggccgccacagcggaacggataaaagacagcttaaaatatatgcttgtgtcaggcatgttttttgaagagctgggctttacgtatttaggccctgttgacggtcattcctaccacgaactgtttgaaaacctgcaatacgccaaaaaaacgaaaggtcctgtccttttgcatgtcattacgaaaaagggcaaaggctataaaccggctgagaccgacacaatcggcacatggcacggaacggggccttataaaatcaatacgggtgatttcgtcaagccgaaagccgcggcgccttcatggagcggacttgtcagcggcaccgtgcaggagctggcgcgcgaggatgacagaattgtcgcgattacaccggctatgccggtcggctctaagcttgaaggatttgcgaaagaatttcctgagcgcatgtttgacgtcggaatcgcagaacagcatgcggcgacaatggccgcgggaatggcgcttcagggtatgaagccgtttcttgcgatttattcgacctttttacagcgggcgtacgatcaggtcgtccatgatatctgccgtcaaaacgcgaatgtatttatcggcattgaccgcgccggtttggtcggcgctgacggggagacgcatcaaggcgtctttgacatcgcctttttgcggcatataccgaacctcgttttaatgatgccgaaggatgaaaatgaaggccgccatatggtcaatacagccctttcatacgaggaaggtccgattgcgatgcgcttcccgcgcggaaacgggctcggcgttaagatggataaagagctgaaaaccattccgatcggaacatgggaagtgctccgtcccggaaaagacgcggtcattttaacattcggtacgaccattgaaatggcgctggaagcggctgaagaactgcaaaaagaaggcctgtccgtgcgtgtcgtgaatgcgaggttcataaagccgattgataaacaaatgatgaaggccattcttaatgaaggtctgccgattttaacgatagaagaagctgtgcttgaaggcggattcggcagcacgattcttgaatacgctcatgacctcggcatgtatcatacaccgattgacagaatgggcatcccagaccggtttattgaacacggcagcgtaaccgccctgcttgaagaaatcggtctcacgaaggctgaggttatgaatcggataaaactgctgatgccgccgaagacacataaaggaattggatcatgacagcaaaaaaagaacgattagatgtacttcttgtagaaaaaggccttgcggaaacgcgggaaaaagcgaaacgcgccattatggcgggcatcgtatactcaaatgaaaaccgattggacaaaccgggtgaaaaaatcgcccgggatcttccgttaacggtaaaaggaaaccctcttaaatacgtcagcagaggcggattaaaacttgaaaaagccttggaagtgtttcctgtctcggtaaaaggcaaaacgatgattgacatcggctcgtctacagggggattcacggattgcgccctccaaaacggagctgagcggtcctacgcagtggatgtcggctataatcagcttgcttggaagctcagacaggacgagagggtcgtcgtcatggaacggacgaatttccgctattccgagccttccgatttcacagagggtttgccggaatttgcgacaatcgatgtttctttcatctcactccgcctcattctgccggttttaaaaacgctgcttgtaccggggagcgattgtatcgcactggtgaagccgcaatttgaagccggacgggaatccgtcggaaaaaaaggcattgtcagagatcccggcgttcatgctgacgttctccgccgcatgaatcaatttgccgcttctgaaggatatacagtgaaaggactgtccttctcaccgattacagggggagacggcaatattgagtttctgcttcatctggaatggggcggagaagacggaaacggcgctgaactgccggaagaagatattctccgtatcgtccgcgaagcacatgagacattaaaagccaaaaagacagatgtaccggaataatagggggctattattccttttttctgccatcatgtactttttatcaagaagcggttaacataatgacaagaacagcttgaaaacagaggtgcttacatgacaaaaggccaaaggcatataaaaatcagagagcttattacaagccatgagattgaaacgcaggatgacttagttgacatgctgagagaagaaggatataaggtaacccaggcgactgtctccagagacattaaagagctgcatctcgtaaaggtgccgacgaacaacggctcctacaaatacagcctgccggcggatcagcggttcaatccgctgtcaaaactgaagcgttcattaatggatgcgttcgtaaaaattgactcagcaagccatatgatcgtattaaaaacgatgccggggaatgctcaggcaatcggcgctctgatggataatctcgaatgggaagaaatcatgggcacgatctgcggagatgacacgatcttaatcatctgcaggacgcctgaagatacggaaggcgtacaaagccgtcttttggagctgctgtagcgtaattatcagataaaaggtggaatgctgtttgttagctgaactatcaataaaaaactttgccattatagaggaactgacgatttcgtttgaacgggggctcaccgtcctgacgggagaaacaggggccggcaagtcaattattatagacgccgtttccctattagtcggcggacgcggctcgtccgaatttgtccgttacggtgaaacaaaggccgagcttgaaggactgtttctattggacagcggtcatcccgtttttgaagtatgccgtgagcagggaatagacgcatctgacgacatgattgtcatgagaagggacatcaatgccggaggaaaaagcgtctgccgtgtcaacggaaaattagtgacgattgcggctttaagggaaatcggcagacttttattagatattcacggacagcatgataaccagctgttaatggaggacgacaaacacttggagcttttggataaatttgcgggcgctgaggccgaatccgcgcttcaggcttaccatgaaggctatgagcgttatatggagctgctcaaaaaagtgaagaagctgtcagaaagcgagcaggaaatggcgcatcggttagacctgattcaatttcagcttgaagaaatcgagtcggcgaagcttgaattgaatgaagacgaacttcttcaggaagagcggaagcagatatccaactttgaaaaaatttatgaatcattgcaaaacgcctataatgcgctccgcagcgagcagggggggcttgactgggtcggaatggcctctgcccagcttgaagatatttcggatatcaatgaaccgctgcaaaagctgtctgaaagtgtgtcaagttcctattatctgctggaggatgcaacctttcaaatgcgcaatctgttagatgatctggaatatgacccggaacggctgaattttattgaaacccgtttaaatgagatcaaacagctgaagcgcaaatacggagcgacggtagaagacattttggaatacggctctaaaatagaagaggaaatcgatcaaatcgagaaccgcgacagccaccttgaagccctgaagaaggaattggagtcggtcggcaaagatgtggccgtagaagccgccaatttatcaaaaatcagaaaagcatgggccaagaaactggcggaagcgattcatcaggaattacaaagtctgtatatgggcaaatcaacgtttgatacggaatttctcgtgaaaaccgatccgtcagccagtgaagcaccggttgttaacgggcagcccgtgcagcttacccaaaaggggatcgaccttgtgaagtttttaatttcaacaaacaccggtgagcctttaaaaccgctgtcaaaggtcgcttccggaggcgagctttcaagggtgatgctggcgatgaagagtattttttcttcccagcaggatgtcacctccatcatctttgacgaagtggacaccggtgtaagcgggcgggttgcccaagccatcgcggaaaaaatccataaagtatcgaccggttcacaggtgctctgcattacacacctgccgcaggttgccgctatggcggatacgcaccttctgatcgcaaaagaattcaaagacggacggacgacaacgcatgtcacgccgctttccaagcaggataaggtagcggaaatcggccgcatgattgcgggtgttgaagtgaccgatctgacaaaacggcatgcacaagagcttttaaaacaggccggacaggtaaaaacgacaggataagctgctgatacaggcagcttattttttgttccatttctctaacagtgtatccaatgtttttcttcgtatgccggttataaatcaagcgcaggaaggcaaaagtatagatgtagcagaaaaagaaagtggtgtgggataggagcgaggagagtgaaggaatgaatgcacgataacatgaggaaagcaataggtgtaattctccttgtttctttactaagtgtaggcttttttaagccgtttaaagaatatttactgataccgtcagaaatgagcgtctttgaaaaccagacacaggccgttccggtcaatgcatcaataagcgctgaaaagggcgaattatcagaagcctttacgctgaaagaagagcacggtcatgcaaacataacagggcaaacacaaggcaggtcagaagtagtatatgatcttgccggatttcccattaaaaaaacgaaagtgcgtgtccttcctgaattgaaggtcattccgggcggacagtccatcggtgtaaaactgcattcagtcggtgttttggtcgtcggttttcaccaggtgatgacaaaggatgggaaaaagtctccgggagaacaagcgggtattgaatctggcgacatcattattaaaatgaacggacataaaattgaaaaaatgagcgacatcgccccgtttattcaaaaagcgggcaaaaccggtgaatctctggatttattggtgaaacgcgataagcaaaaaatcaaaacaaagctgattccgacaaaggacgaagccgaggggaaatatcgaatcggcctttatatccgtgattcggcagccggcatcggcaccatgacattttttgaaccgaaaacaaaaaaatacggcgcattgggccacgtcatctctgatatggatacaaaaaaaccgattgttgtagaagacggagaaatcgtccgttctactgtaacatcgattgaaaaaggaaaaggcggcaatccaggcgaaaaactggcaaggttttcgtcagaacggaaaacgatcggcgatattaaccgcaacagcccgttcggcatttttgggacactgcatcagccgattaaaaacaacatttccgacaaagcgcttccgattgctttgtcaaatgaagtaaaaaaaggacctgcgcaaatgctgacggttatcgaaaacgataaagtagagaaatttgatattgaaatcgtcagcaccacgccgcaaaaattcccggcgacaaagggaatggtattgaaagtgacagatccgaaactgctgaaaagaaccggcggaatcgttcaggggatgagcggaagcccgatcatccagaacggaaaggtcgtcggagccgtaacccacgtatttgtcaatgatccgacaagcggctatggcgttcatatcgaatggatgctgtctgaagcgggtgttgatgtttacgggaaagacaaagcaagctgactgccggatgatccggcagtttttttatgtgatgcgttcttcacttctttccgggattcatgtaaaataagacatgaagatttttcgacaaattcacgtttcctgatttgtcaaacttaatttttagtcgaaaaacctagaaaatgctagaaaaacaaagatataccactattattggtaaatatggattttttaaaaggggaagtagtggttttgtcgaatgtaacatatagcagtcaaatgggttgcgtcctgttaatacattgggggaggaagaaacgtggagaaaattaaagtttgtgttgctgatgataatcgagagcttgtaagcctgttgagtgaatatatagagggacaggatgatatggaagtgatcggcgttgcttataacggacaggaatgtctttctttgtttaaagataagaatcccgatgtgctcgtgttagacattatcatgccgcatctggacggacttgcggttttggagcgtctgcgtgaatcagagcttgagaagcagccgaacgtcatcatgctgacggcattcggtcaggaagacgttacgaaaaaagccgtcgatttaggcgcatcctatttcatcctgaagccgtttgatatggaaaaccttgtcggccatatccgccaggtaagcggaaatgtcagcagtgtcacacaccgtgcgccgtctgcgcaaagcagcattatccgcagccagccggagccgaagcggaaaaatctcgatgccagcattacaagcattatccatgagatcggtgtgcctgcccatatcaaaggctatctttatttgcgtgaagccatttccatggtgtataacgatattgaactcctcggcagcatcacaaaagtcctttatcccgacatcgccaaaaaattcaacacgaccgcaagccgtgtagaacgggccatccgccacgccattgaagtcgcatggagcaggggaaatattgattccatttcttcactgttcggatatacggtaagcatgacaaaagcaaaaccaaccaactcagagttcatcgcgatggttgctgacaagctgagattggagcataaagcttcgtaacgcaagcctttggctaaatgtctttttgcgccttctattccgtgcatgaacgcggaagagaaggcgttttgagattttgctgacgaaaacaatgggaaccactcacgccggtacttgttctatacataaatacgggaactgccgtctatacgtataataccggagctgatattttaatgattttgccgtctctgaaataaaagcgggggatgcggcggcttaacacagaaaggacttcgtagctgatcgtaccgagcatttcggcaatttcatcaacggaaatctcggctccttgttgtttgccgtagatgacgacttcttctccttgtttgccctcattctcacctaaactgaccattatcatatccattgtcactctccccgccaccggcacccgtctgccgcggtgcagaataaacccgcggttggacagggcgcgggagtaaccgtcagcatagccgatcggaatcgtcgcgatgatttcacccggttcggcgatatatgtggcgccataactgacggtccggggatctgtcaccatagctttcacataagcgatacgcgcctttaaacttagtgcgggtgtgagatccacgaggttcagttcctttatcgaggcggacggatataaaccatataacccaatacctaaacggatcatgtcggcgctgaattccgggaatgcgatagcggcggctgtattgcacatatgcacggtaggcagcgtaatgtcttgattttttaaaaagcggagaaagctgataaacttttcgtgctgcagcatcgtcagctcagtgtccggttcatccgctgttgaaaaatgtgtaaagatgccatcccatgacaggtatgtactcgacttgagcgctttcaccactgctaaaagatcttcttctgtgcgcacacccagccggcccattccggtatccacattgatatgaatggacagccgtttcgactctgcttctttttccaatatccgattcgcttttttgatccagctgacctgaaacgctgataatgtgatgttccaaacggcagattttttcacacagctgagagctgtgaagccgagcacaagaataggcgctttaattcccgctctccgtaacacaattccctcttcgacgctggcgacagcaagctcgctcgccccgctttccagtgcctgccgcgctacttccacagagccgtggccataagcgttcgcttttacgacggccataattttagacgtattcggaatatggcggcggatcgcccgtacgttcttttttatcgcatcaaggtcaacttcaatccaaacttcccggcaaagttttttcatcacgattccttctttccttaatgagattcagtactcatgctttcaatctgcattctattcatctttaactgaaatcattcaaaacatgagaaggtgaccgctgatgtttaaaatcaagttttcgggaaagcatgcgcctgctttatttatgcagtaagggcagcatggcggcccttacaatgactttacaatattctgatctgaaaattgatgttcaaacattttggactggcttacagcattgttttgaatgacaatgccgatatttccccctccggcaccgaaaacggtttttgatgcagtcagcggactgatggatatggcgccgccaacattgacaactccgtttcctgatacgttgtttatcgtaatcgggcaaccgctcattctattttttctcctttctctcacagtctactaactatatgtacgctgtgatatggaataagattaaacaaaacggcaaaaagaatccggctgctgccagccggaaagggagggaaatacggatatcataatgttttcgttacattttgatcagagtattgagagtttgaagattgagatgtgctggattgattcatttgcaggaccatacctgtatttccccctcctgagccgtagacggtttttgatacggttaaaggacttatcgaaaacgcaccgccgacattgacaaccccgtttccggaaagactgttaatcgtaatagggaaaccagccatcatatacggtctcctttctattaatctatttactatatgtacgctgtgtgttagaaataggagtaaacaaagcggtaaaaacttgtgaatcaaaaaaactgccggacatccggcagttttttagtctacttttcaaacggcacccagccgcctgtattctgaatcatttcccataacggttcaggaagtcggtatttatcaatttcagatgcctgaatggctttttcgatttcctgttcgcggccttctttgaccagcaccgcccattcggggttaatcaaaatgacacgtcccagagccaccagcggaattccgctttctaatacggcaagcgcttcgtccgcggtatagatggaaccgacggccatcagcggcactttatggccgacgcgttcgtttaataaatccatccgggtccgtgaagtatccgcgccgcggcgggctttggaattgacatccatcagtgaaatatgcagataatccaagttctcttccgcaagcgcgtcggcgagcatgaatgtttctttcattgtaagccccggtgtttccggctcttccggtgacaggcggtagccgagaacgaatggattttcagcgtgtgtatcaatcgcctgtttgacagcgtcaacgactgcaagcgggaacgcaaggcgcttttcatcgcttccgccccagcggtctgtgcgccggtttgttttcggtgaataaaattggtgaatcaggtacccgtttgccccgtgaatttcaacaccgtcaaagccggcttcaatcgctctgcgtgtcgcttcgccgaatgctttcacgatgtgctcaatttcttgttctgtgagagcacgggacgtttgtctgccgtcttcttctgagccgctcggactgacgacgtcgttgtttggcacgagttcaggagggcattccaagcctccgtggtgaatctgcacaacggctttcgctccttgagactggatcgcctgagcgagttttttcaagccgggaatgtgagaatcatcatagatgccgggctggcctggaaacgctttgccgtccggcgttacgtttgcacatgccgtaatgaccatgcccatttcttttgaacggggagtaatgtagcttaattcacggtcggaaatcgttccgtcatcatttgatgaatagtgtgtcatcggtgcgactgaaatacggtttggtatagtgacaccgctttcgaacgtaaaaggttcaaacagcggtttataagtttgcttcatcatttcgccttcttccttaggagtttaactcgtccgtattctagcttatgttttcattgtgtgcaattattttgcttgttcttcttcctgaggttatgaccggctgaaccatttaaacgaatgaaacggttttctccgttccttttcaggatctttatatcctcctgaaatttgatggccgatcgagctgaatatgacagcggcggcgaagaggagaatgatttttttcatatgcatatcttctttcttatcttttacatggttatttataagcatacgcttgtgcgaaaaaaccgtcaatttgtttattcttttttccactttcctgcggcgaatatcgttccgatctgaatcacaacacttaacagagcgcacactgccacaactgtgttgctgtccatagaagacaccctcctttttgttaggttgatgtatcatatgacggctgtctctgttttgacaaaaccgtaatgcggtgtttcatatttttcaacacaaaaagggcgcttttttaagcgcctttacttttttttcagccggttcaaagcgatttgaacggcgatggcgtcatccaggtagccgatcggaaacatgtaatccgggataacgtcggtcgctaaaatataatacagcagcgcgctcccgagaatcgcgcggtcttcagccggtgttgattcatccatatactgatgatgcatgtttttcaaatggtcaataaaagggccgacgctttcttcattgtccattttcttttgaaactcatcgcaaatcaggcgatggccctgctgggttttggcgtattgttcatatctggtcagttcacgctcaatttgctcccgggaaaaaggctgatcaaacatctcggccatattcagcatatcctgaatcgcgtgcatcgggtcttgcggcgcagcttctttttcatggccgatgtctatgcctgacgcctcaagcaattcctccagcggggtgcggaggtgttttgaaaattcctgaagatgctttaaattggccttctgtttgccgttgataatccgggagatagtggccgtatcaatgtttgttaaggcgccgagttttctcatggagagcgagtgcttatcaagcagtgattttaaaaggggtcccagtgtcttatttttattttctgtcaagggtgtcacctcgtttccgccggaatgatgatcgtcaatcaataatttttgcagaaaaggtaccttttctgtgctgctgaataggatagtgtagattcaacggcacaacatgttgaaaagacatcaaagaatggagagaaacgaacatggcttggttattgattttaggtttggcagtgtcctcaagcattgataatttaggagtggggatgtcatacggcatcagaaaaatcaaaatatcgcatgcgtcaaatatgatgatcgcttttatctgttttgtattcagttatatcggaatttatttcggcaaatggatttcagccgttttaccgggctttcttcctgtattgctggcggcgtttattttatctgtcatcggtatccgcatcattctgctggctgtgccgagaaaaacagcgcgtgttggcgggtcaggaaaaaaaggccgttttgccggtctgctgcaaaatccggaggcagcggatgccgacggttcgggagaaatcggtatattggaatccttggttctcggggtggccgtatccgcaaatgcgctgaccaacggattaagcgcggggttgatcgggctttctcccgctgccatttccattactgcggcggtcggaagctttctgaccatatggatcggctgctcgcttggaaaaaaagccgcttcattgcgcatcggttcttttcacgtcggacagttcagcacggtgctgagcggagtgattattctcatcattgccgccaatacgctgctcttttaagttgtcccgttcattttatgaaaagctcaaaataaatatgaatgtttctattcgggagagtgcatgacgcggctctcttttttgccgatctgatattttttcaaaatgaacagaaagtcgtccgtttccgttaaattctgcatattcggccttcagacagaacctttttcatagactgatcagcttgttttctttctaagttcaggtaaacagcaggtcagatagccttcattccaaagatggaaaaacgctggaggaatggaggctccctttacaaatcggccattctgttcaaagataaagccgaatgagaaaacgtgaggtgatctgtgtgaagtctgccatacttctgatcttcaccgcatggctgttatcaggctgcgagtataccgcggaggctgatgcggcgccgtcatttacacaggaaggaacatttataaaagcggccggaaacgatacgatcgcggtcgaaattgacggagaaaggcaagaggtgaaggtgcctttcgctaagcggtttgaatgtcagtcgctgcctgaacatacggcggtgcaaatcacctataaaaaagagagcaacggacaattacggcttgagaaactgaaaaaagaaacagatatgtgaaaacggggaggaaaaaaacgtgggtttactgacaaaaagcgctgctgccttcggtgccgctctgcttctgcttgcgccgtccgcttatgcagccgaacctttgcaagggaaaaccatctatatagatgccggacatggcggagaagacagcggggccggcggaaatggactgcttgagaaaaacatcaatttagcggtgtcaaacaaggtgatcgccaaattggagacagaaggcgcaaaacctgtagcttcaaggactgatgatacttttttacgtttggacgagcgggtggcgaaagcgagcgccagccaatccgatttattcgtcagcctccataccaattcagccgtatcaacggcatcgggcgcggaaacgtattttaattcgacatatgaaggagcggacagcgaaaggcttgcttccgacattcagcagcagcttgtcacgtctttagggatgagggacagaggcgtaaaagaagctcctttttatgttattacatattcaaagatgccgagtgtgctggctgaattaggttttatcacaaatcctcaagatgcggacaagctgaaaagcgataacggacaagagcacgccgcggacgccgttgtaaacggaatcgaaacctattacagcggacggtaatgataaaatatgtgtaaatagcgccctcctgatgtgcataacgattataatagagaaaaccgatgacaaacatctgaggtgacacatatgacgaatatttttgcccaccggggggcgtcgggcgactgccctgaaaatacgatgcccgcattcaaaaaagcgattgaggacggggctgacggaatcgaacttgatgtacagatgacaaaagacggccggatcgtggtcattcacgatgaaaccctcgaccgcacgacatctttgaaaggatttgtgaaagatacggcgtatgacaaaatcagaaccgccgatgccgccggaaaatggaaagattcttttaaaggtgtcagaattccgcttttgtccgatgtgctgcgttttgctgaacgtgctgattttctgataaacattgagctgaaaaacagtgtattccgttacgaaggaatggaagaagaagtgatcaaaaaagtcagatattacggactggaaaagcgcgttattttttcttcatttaatcatgagagtctcgcggtgtgccacgccctggcgcctgaaattgaacgggcggtgctgacaatggatgtgctgtaccggcctgaacgttatcttgccgccattcccgcttcgggttatcatccgaagctcggcacgccggcggtcagcgctgaagtgatcacacatcttgcaaaacaccaagcggcgctccgtccgttcaccgtcaatcgtcctgaggatatgaagcggctgatgaaagcggggatagacgcgatttttacagattatccaaagctggctgtttctataaaagaagaatgccgcagctgagaagactggtcagacagtcttctttttttatgggcgggaaaaaggcggtgcactcataactcggtcagccggttcatatattgtaacagggcgttttgtgtaagcgttatcttttatcttattgaaagtgaggcaaaattgtgggaaaaacggttatcgtcagtgcggcaagaacgccgttcggaaaattcggcggcgcattaaaagaggtgaaggcatccgagcttggcggcattgccataaaagaagcaatcaagcgcgccgctatcagtgaaagcgaagcggaaggagcggtgatggggatggtcgtccaggcgggtgccgggcaaattccggcacggcaggctgcaagatatgccgggcttccgtggtctgttccggctgaaaccattaataaagtctgtgcatcagggctcagagccgttaccatctgtgatcaaatgatccgggcgaaagacgcggacgtgctgattgcaggcggaatggaaagcatgagcaacattccgtacgccattccggccggccgctggggtgtgaggatgggggacggggtttttcaggatttaatggttcatgacgggctgacctgtgcgttcgaccaggtgcatatggctgtccacggaagcactgcggccaaaaagtacggcatttcccgagatgaacaggatcattacgctcttttgagtcagaaacgcgcggctgaggcggctgatgcgggcaaattgcgtgaagaaattgtccccgtcacctggaccggcaaaaagggcaaacagcatatcgttgaagcggatgaggggctgcgtcctgatacaagccttgagcagctcgcagcgctcaagccgattttcacagccgacggaacggttacagccggaaacgctcccggtgtaaatgacggggccggagcatttgtgctgatgtcagaggaaaaagcagcaaagcagcatgtcaggccgctcgcagcgatacttggctttgcgtccgtcggactggaagcgtccgagctggcaagcgcgccgggagaggccatcagccggctcttgaaaaaaaccggactgtccgttgacgatattgatttgtttgaagtaaatgaagcatttgcgtccgtcgtgctcgtgagtgaaaaaatagccgggttcagccgggagaaagtgaatgtaaacggaggggcaatcgcgttcggccacccgatcggcgcaagcggagcgagaatcgtcatgagtttaatatacgaattaaagcgtcgcggaggggggttaggcatagcggctatatgcagcggagcggctcaaggagatgccgtcctgctggaggtgtactgatcaaaggagggagcgccggatgaagatgaaaacaatcatggtcgcaggtgccggtcagatgggggcaggcatcgctcagacggctgcagaagccgggtttgccgtcaagttatacgattgggagccggaaacggtaacaaaaggtcttcaccgcataaagacaaacctggagaaagagcaggcaaaaggacggaagtcacagcaggagacagatgccgttttcagccgtatttccccggcggagctcacagaagcgggagatgctgattttatcattgaagccattgccgaaaacaaaaaagcaaaagcggaattgtttgacacacttgataaaatctgtccccctcatgccgtattggcaagcaatacgtcttctcttcctattacggagcttgccgcggccacaaaaaggcctgaaaaagtaatcggcatgcattttatgaatccggttccggtcatggagcttgtcgaagtcatcagaggactcgccacatcggaagaaacggcggaaacagtaaagaagcttgccgtccggatgaataaaacccctgtcgaagtcaatgacttcccgggctttatatctaatcgcatattaatgccgatgattaacgaagccgtttattgcctttacgaaggagcagcttcaaaggaagcgattgatgaggtgatgaagctcggcatgcgtcatccgatgggtcctttaacattagctgacttcatcgggctggatacgtgcctttccattatggaggttctctacgcggggctcggagatccgaaataccgcccatgccctctgctcagaaaatatgtcagcgccggctggctcggcaaaaaaagcgggcgcggtttttatgagtacggcagatgacgtaaagatcatgaggggagacggcagccatgcattttactgaagagcacatcatgatgaggaaaatggtgcgtgattttgcccgcaaggaaatcgcaccgatggttgagctcatggaatcaacagatgaatttccggagcggctgattaaaaaaatgggcgaagcgggattgatgggcattcccgtcccggaagcttacggcggggcgggtgctgatacaacatcttacattttagcgattcatgaaatatcaaaagtcagcgcggccgtcggcgtcattttgtccgtccacacatcggtagggacaatcccgattttgcatttcgggacagaagcccaaaaacaaacgtatattccgaagctggcagcgggcgaatatattggagcttttgcgcttactgagactcactccggatctgatgcgggaagcctgaaaacaacagccgtgcgaaaaggcggttcatatattctgaacggttcaaaaatctttattacaaacggcggagcggcagatctgtatctgacatttgccgtaaccgatccgggtaaagggagaaagggaatttcagcgtttattgttgaaaaaaacacacccggtttttctgtcggaaaaaaagaaaaaaagctcggattgttaggttccaatactgccgaattgcagtttgatcaagcggaaattccgattgaaaaccggctcggcgaagagggcgagggtttttcaatcgccatgaaaaaccttgacgtcggacggatcggcatagcggctcaggcgctcgggattatcgaagcggcgctcggctgctcggcggagtacgccaaaacccgcagccagttcggcagacccatcgcttcgaatcaggccgtttcatttaaattatctgacatggcaacgaatgcggaagctgccaaattattggtctatcatgcggctgatctgtatcagcgagggcttccgtgcggaaaagaagcatctatggcgaagcaattcgcgtccgatgcggcgatgaaagcggcggtggaggctgtgcagattcacggcggctacggctatatgaaagagtatcccgcggagcgtttatttcgggatgcgaaagtcacgcaaatctatgaaggaaccaatgagattcaaaggctgattatttctaagtatcttcttcaataaaaagtgcgcaaaggagcgaaactatggaatcttattctcccggtttagatggcgtcattgcggtggaaacggggatttctttcctggatacacagcagggcagtattttaatcaaaggccacgatctgattgagctttctaaaacggccggctatatggacattgttcatctcttattggaagacagacttcctgatgcgaaagagaagaaggcgcttgaagaagacgttcggcgcggcggacaccttcccgaggaaatcttgcgtatatgccgtctgctgcccgaacgtactcacccgatggacggactgaggacaggtttgtccgcgcttggaggctttgataaggatattgataaccgcacctcttctgtaaatcggcaccgtgtccgcgggctgataggcaaaatgcccaatctgaccgtcaacagctatcgagtcatcaacggactggagcctttagcgcctgtcggaaccttgtcgtacagcgcaaactttttatatatgattaccggaaaaacgccgtcctccttggaagaagaaatattcgaccggtcgcttcttttatacagtgagcatgaattgccgaactcaacgtttacggcccgtgtcattgcttcgacgcaatcggatatttacggcgctctgaccggagcagtcgcctcgcttaagggaaaccttcacggcggagcgaacgaagcagttatgtacatgcttgaggaagcgaaggatacagacgggtttacacaattattaactcaaaaactcgcaaacaaagaaaaaatcatgggcttcggccaccgtgtctacatgaaaaaaatggacccgagggcgctcatgatgaaagaagcgttgaaaaaactgtctgatctttcaggtgatttccgtctttatcatatgtgtgaagcaggagaaatcgtcatgcgggagaaaaaaggcctttacccgaacttagattactacgcagcgccggtctattacatgctcggcatcccgatcccgctgtatacgcctatattcttcagcgcacggacggtcgggctgtgcgcccacgtcattgaacagcacagccgaaaccggcttttccgcccgcgtgtccgctataccggagcgcgtctgtaaacagatgagaaaggaagatgaaaacatgacagaaccccgccgaatggacgccgtaatcgaagagatttctgactacgtgctccatcaggagattgacagttcggaagctttcactacggcaggacatgtgcttcttgatacgataggctgcggaattttggcgctcagctatcccgaatgtacaaagctgctcggcccgattgtcccgggaacctccgtgcccaacggcagcagagtcccgggcacgccttttgttttagacccggtcacggctgcctttaatatcggctgtatcaacaggtggctcgattataatgatacgtggcttgcggccgaatgggggcatccgtctgacaatctcggaggcatattggcttgtgcggattatatatccagagtgcggatttcagaagggaaagaaccgcttaccgtgcgtgatgtgctttgcgcaatgatcaaagcgcacgaaattcaaggaattctcgctttggaaaacagtttaaacagagtcgggcttgaccatgtgctgtttgtgaaggtggcgactgcggctgtttgcgcacaaatgctgggcggctcaagagaggaaatcaataacgccgtatctcacgcttggattgataattcaagcctcagaacgtatcgtcatgcgccgaacaccggatcacgcaaatcatgggcggccggcgacgcgacgagcagaggcgtatatttggcccttatggcgcaaaaaggtgagatggggtacccgacggctctgaccgcatccgggtggggatttcaagacgtattatttaaccggcaggaaatgaagcttgcccgcccgcttgggtcctatgtgatggagaatgttttgtttaaagtatcctatccggctgaattccacgcccagacagcggcggagtgcgcggtccggcttcatccggaggtgaaagaccgcatcgaagacattgacaggatcacgattatgacccatgagtcggcaatccggattatcgataaaaaagggccgcttcacaatccggctgaccgggatcactgcctccagtatattacggcaatcgggctgcttttcggagatatcacggcggatcattatgaagaggaaacggcgtctgacccgcgaattgatacattgcggagcaaaatggaggtgacggaacataaagcgtactcaaaagattacttagacccgaataagcgatccatctcaaatgccgtacaggtgcattttacagacggcacggctacgggacggattgaatgtgaatatccgctcgggcaccggttccgcagaaaagaagccgttccgaagattcttgccaagttttcagcaaacatcagcactcatttttcattgaagcagcagcggaaaatcgaagaggcctgtaaagatagcggccgaatgcagaagctcagcgttagtgaatttatggacttatttctcatataaaataggagggtgacaaacatgacgtggatcgtcagcaagcagtcgtctcaagaggagcttgcagagcggttccgtacgctgatggcagcgccggatctattgcagattccaggcgctcacgatgcgatggccgctcttattgccaagaaaacgggtttttcggctctttatttatcaggcgcggcttacacggcgagcagagggctgcccgatttaggcatcatcacgtcggcggaaatggctgaacgggttaaagatctggtccgctcgtctgatctgcccgtccttgtcgatattgacacgggtttcggaggcgtgctgaatgccgcccggacggcgaaagaaatgtatgaagcgcgcgcggccgccgtccaaatggaggatcagcgcctgccgaaaaaatgcggacatctgaatgggaagcagctcgtgccgattgaagaaatggcgcaaaaaatccaagcggtcaagcgggccgcgccgactcttcttgttgttgcgagaacagacgccagacagcaggaagggctggagggggcattaaaaagggcgtccgcttatataaaagcgggtgctgacgctgtttttccggaagcgctccaatacgaaagtgaattcagagcgttttccaaacaaatcagtgtgccgattctcgcaaatatgactgaattcggacaaacgccgtattacagtgctgatgaattttccgatatgggctgtcagatggtcatttacccggtcacgtcactcagaacggctgccaaggcttttgagcgtattttccgccttctgaaagaagaaggctctcaaaaagaggggctttcggatatgcagacgagaaaagaattatatgaaacgatcgcttacgatgactatgaagaactggatcaatccattgccaaaacgatactgccggacgactgaaaaagcccttttttgcaagggctttttttacagcttttttttcctgaaccgcgggctgacttgattgcgtttccgatctctgtacaaaataaacccggccagaacataaaggccgaacaaaaaaaacgccaatccggccgccccctgaagaaaaagggacggaaacggggaaaacgcatgcccgaataatgcatctctcatcagtttaatgccgagcgccgcgacagcgccggggaggaccagaatcaaaagcgcaacaagccggctcatattcagaaaacccctttacgatatgatttcctttattgtccaatcgaaaaaatattttgtcaagagatcaaaacgtggtaacataggggttgtgcaaattattgcaacgggaaatacaggtgtgcaaattttttcatataaaggggtatcgggatgcagaaggtgctgattataggtgctggtaaaggaggcacggcgctcctacagattttgatgaaaacaaaactgatccggattattgcggtggttgatcaagatccggaggcgcaagggctgcaagaagcccggagatatggaattgcaacctcatcagattggaaaccctacataactgaagatatagatattatcatccatacaacaggcgataaagcggtcatggatgagctgctccatgagaaaaaagaacaaaccatcgtcatgccgggaaaattggcgtacatggtgtttcagctgatggaggaaaaacagcagcttatccaaatgctgaagtcgcagacgtataagcatgaccggatttttaattcaacgcacgacggcatgatttttatagacgtcaacgaaacgatcattttatttaatcagatggcagaaaaaatggtcggccgaaaacgggaggatgtcatcggccgccaaattaaagatgtagtgccgaacacaaagctgccgcggattctggaaacgagagagccggaatataaccagaagcagcttctcggcaagcacctgcagattgtcacgacaagactgccgatcattgatgaaggcggaaaacttctcggcgcgttatgcgtgtttaaagacatcaccgacgcagttgaactggcggaagaggtcacgaacttaaaacaaatccgcaccatgcttgaagcgattattcaatcgtcagacgaggccatttccgtcgttgatgaaaacggcatcggaatgttaatcaacaaagcatatacaaaaatgaccgggctgtcagaaagcgaagtcatcggaaaacccgcttccaccgatatctcagaaggggaaagcatgcacctgaaagtattggggacaaggcggcccgtgcggggtgtgaggatgaaggtcggccccaataaaaaggatgtcatcgtaaatgttgcccccgttattgtggatggtattttaaaaggcagcgtcggcgtcatccacgacgtgtcagaaattaaaacgctgactgctgagctgaatcgggcgcgccagatcatccgcacgcttgaagcgaaatacacgtttgatgacattatcggcacgagtgaacaaatgctggttgcccttgaacaggcgaagctcggggcgaaaacgccggcgacgattctgctgcggggagaatccggcacagggaaagaacttttcgcccacgccatccataatgaaagcgaccgaaaatacaataaattcattcgggtcaattgtgcggccctgtctgaatccctgcttgaatccgagcttttcggctatgaggaaggcgcgtttacgggcgcgaggcgcgggggcaaaaaaggactttttgaggaagcgaataacggcagcattttcttagatgaaatcggagagctgacccaaagcacccaggcaaagctgctcagagttctgcaggaaaaagaaattatcagagtcggcggcgcaaaagcgatttctgtcaatgtcagaattatcgcagcgacaaacgtcaacatcgaaaaggccatggcggaaggcgcgttccgcgaagacctgtattaccggattaaccgctatccgatctcaatcccgccgcttcggcagcgcaaagaagatattgaagcgctgagcattcggctcattgaaaaaatcaatcaggattacggccgcaatgtaaaggggctcacgccgaacgcgctgcgagctttatcagcctacagctggccgggaaacgtacgggagcttgaaaatgttctcggacgggcaatgatatttttagagccgcatatggaacggatcgaacagcagcatctgcctgttttcgaatcagagctgaatgacaaaaacggcacccaaagtgattttccggatgtagaaggggaaaagctgtctcaggctgttgaaaaatttgaagcgcacatcattcaaaaaacgcttgaaaagcataaattcaaccgaaccaaaacggcgaaagcgcttggtgtcagcattcggaatctgtactacaaaatggacaagtacggccttgcaaatgacggcatgcaataaattgcagagaaagcgcaaaccgctgcatgttttcttgaaaaaagccggaataaaccctttcgcatatttggcacagaacttgcattgttaaaagcggattcgcacaagaaaggtggtacaaaatgaagctgagagacctagttgaaaaagccgcggcaaaaaacgcaaaaaccattgcagtggcccacgcagcagataaagaagtgatccacgccgtcaaaatggcggcagaacacttgtcggcacgatttttactgacgggtgacagcggaaagctgaaagagcttctggcaaatgagccgaagttcaatgctgacatcatccacgccgattcaccagaagaatctgcggcaaaagcagtgcgcgcagtgcgtgaacaagaggcggacgttttaatgaaagggaatctcccgagctcaactcttctgaaatcggttttaaaccgccaggaagggcttcgttcaaaaagggtgttatcacatgtagccgtttttgaagtgccggactatgaccggctgatgtatgtgactgattcagcgctgaacattgccccgtctcttgaagagctcgggcatattctgcaaaatgcggttcatgtcgcacattcagtagggaaccctatgccgaaagccgcagtccttgcggctattgaaacggttaatccgaaaatggaggcgacgctgaacgcggctgcgatcgtccagatgtgcaatagaggacagattaccggctgcattgcggacggaccgcttgctttggataatgccgtatcccaagcggctgcgctgcaaaaagggatttccggaagcgtagcgggccaggcggatattctcttggttccttcaatcgaggccggaaatatgctttataagtcaatgatttattttgcgaaagcaaatgttgctgctgtcatcgccggtgcaaaagcgccgattgcattaacgagcagagcggataccgcagaaaataaactgtattcaattgcgcttgcgatttgcgcatcacaagaacagtaggaggaacgaacctatggaaatttttaaatatatggagacttatgattacgaacaattggtattctgccaagatgaacaatccggattaaaagcgatcatcgcgattcatgatacgacgctcggccctgcactcggcggaacaagaatgtggacatatgacagtgaggaagcggcgattgaagatgcactgagactcgcaaaaggcatgacttataaaaatgcggctgccggtttaaacttaggcggcgggaaaaccgttattatcggagacccgcgcaaagataaaaatgaagaaatgttccgcgcgttcggccgctacatccaaggcttaaacggaaggtatattacggcggaagacgtcggcaccaccgttgaagatatggacatcattcatgatgaaacagactatgtaaccggaatttctccggcattcggttcatcaggaaatccgtctccggttacggcgtacggcgtctacaaagggatgaaagccgcagcgaaagcggcgtttggcactgattcactggaaggtaaaacaattgccgtgcaaggcgtgggaaatgtggcttacaatctatgccgccaccttcacgaagaaggcgcttctttaatcgtaaccgatatcaataaagaatctgttaaacgtgccgttgaggacttcggcgcccgcgccgttgatcccggcgacatttactcacaggcgtgcgatatttatgccccgtgtgctctcggcgccgtcattaacgatgacacgattaaacagctgaaggcgaaagtcattgcgggggcggccaataaccagctgaaagaaacacgtcacggcgataccattcatgaaatgggaatcgtgtacgctccggattatgtcatcaatgcaggcggcgtcatcaatgtggccgatgagctttacggctacaacgctgagcgtgctttgaaaaaggttgagggcatctatgcaaacattgagcgggtgctcgatatttccgcgcgtgacggcattccgacatacttagcggccgaccgtctggctgaggaacgaattgagcgcatgcgccgttcaagaagccagtttctgcaaaacggccaaagtatattaagcagacgataggaatttgatctggaggtatgaaaatgttcgaacaggaaaaacgcattctcattctgaatccaggctcaacatcaacgaaaatcggtgtctttcacaatgaacgctgtatctttgaaaagacgctgcggcatcccgaagaagagctgaaagcatttaacggcattatcgaccaatacgaatttcgaaaaataagcattcttgagtctttgcacgaacagggcatcaacatttcaaagtttgatgccgtttgtgccaggggcggcctgctcagaccgattgagggcggcacatatgaagtgaatgacgccatgatcactgatttgaaaaacggctacaacggccagcatgcttctaatctgggcggaattattgccagggaaatagcagacggattaaatatccccgcgtatatcgtcgatccggtcgtggtggatgagatgactccgctcgctaaagtatcaggaatgcctgaaatcaagcggaaaagcatttttcatgctttgaaccaaaaagctgttgcccgtcatgcggcggcgtccctcggcaaacggtatgaacagatgaagatgatcgtcactcatatgggcggcggcatcacagtcggggtccatgattgcggacgggtgacggatgtcaacaacgggcttcacggagaagggcccttcagcccggagcgtgcgggaaccgttcctgcgggtgatttggtggagatgtgtttttccggcaagtattcaaaagccgatatgatgaaaaaacttgtcggcacgggcggactctccggctacctggggacaactgacgcggtgaaggtggaaaaacgcattcaggccggagatgagcatgcgaggctcatttatgacgccatggcttatcaagtagcaaaagaaatcggggcggcaagcgccgtattaaaaggaaaagtagacattatcgtcctgacgggcggattggcgtacgggaaaagtttcgtatccgccatcagatcgtacatagattggatttcggatgtactggtgtacccgggagaaaatgaactgcaatctctcgcgcaaggcgcgcttcgggttttagccggcgaggagcagtcaaagcaatatcagatcggcgaaggagtgaaaacaaatggcgactgaatatgatgtggtcattctgggcggcggcacgggcggttatgtagccgccatcagagcggcccagctcggcttaaaaacggccgttgtagaaaaagaaaagctcggcggaacatgcctgcataaaggatgtatcccgagtaaagcgctgttaagaagcgcggaagtgtaccgaaccgcaaaggaagcggcagcattcggcattgaaacggaaggtgtctccctccgctttgacagcgtgcaaaaacgaaagcagggaatcgttgaccggctggccggcggtgtcgcccacttgatgaaaaaggggaagattgatgtattcaacgggtacggacgtatgctcggcccttccatcttctcacctcttcccggtacggtttccgtcgaatacgcaaatggtgaagaaaacgacatgctgataccgaaacaattgattatcgcaaccggttcaaggccgaaaatgctgccgggtttagaagcagacggtacatatattctgacatcagatgaagcgcttgagcttgagcgtctgccccaatccatgttgatcgtcggcggcggtgtcatcggaattgaatgggcatccatgctgaacgatttcggcgtcaatatcactgtgattgaatatgcggaccgcattttgccgactgaagaccatgatatttcaagcgagatggaaaaactgttaacgaaaaaaggaattaagattgtaacgggtgcgaaagtgcttccggatacattggaaaaagcggatggcgtttcaattgccgctgaaaagaatggaaaaaaagaaacgtatcacgccgaacaaatgcttgtttccatcggccgccagccgaacattgaagggatcggtcttgaaaacacggacattgcagcggaaaacggttctatcatagtaaatgaagccggacagacgaaggaatcgcatatttatgcgatcggtgatgtcgtcggcggtctgcagcttgcgcatgtggcctcccgtgaaggcatcattgccgttgagcatatggcgggtcttaatccggctccgcttgatgccgctcttgtgccgaaatgcatttattcaaatccggaagcggcgagtgtcggtctgacagaagaagaagctgcccgaaaaggacatgaacttaagatcggaaagtttccgttcatggcaatcggaaaggctcttgtatacggagaaagcgatggctttgtcaaaatcgtcgccgaccggaatacagatgatattctcggtgttcatatgatcggcccgcacgtcaccgatatgatctctgaagcggggcttgccaaggtgctcgacgcgacgccttgggaaatcggccagtccatacatccgcatccgtcgctttcagaagcgattggggaagctgcgttagccgcagacggaaacgcgattcatttttaaaaggaaagaaggaggggtttgaatgactacaaaccgccatcaagcattagggctttctgacgaagaagccgttgaaatgtatagaaccatgctgttagccagaaaaatcgacgaaagaatgtggctcttaaaccgctcgggcaaaattccgttcgttatttcatgtcaagggcaggaagcggctcaagtaggcgcggcctatgccctaaaccgcgataccgactatgtgcttccgtactacagagatatgggggttgtgcttgcattcggtatgactgctaaggatttgatgatgtcgggttttgcgaaagcggctgatccgaactcaggcggaaggcagatgccgggccacttcgggcaaaaggaaaacagaatcgtaacgggctcatcccctgtgacgacgcaggttccccacgcggtcggaatcgcgcttgcgggacgcatggataaaaaggatatcgtctctttcgttacctttggagaaggttcttccaaccagggagattttcacgaaggggcaaactttgccgccgtgtataaattgccggtcattttcatgtgtgaaaataataagtatgccatttccgttccgtatgacaaacaggtggcgtgcgaaaatatttccgaccgggcggcaggctacggcatgccgggagtcacagttgacggaaacgacctgctggaagtttaccgggccgtgaaagaagcgcgcgaacgggcatctaaaggcgaaggtcctacattaatagaaacggtttcctaccggttgacgccgcattccagtgatgacgacgacagcagctacagagaacgcgaagaagtagaagaagcaaagaaacaggatccgcttcttttatacaaagcatacttgcaagaagccgggcttctaggtgaagaagaagaaaaggccatgctggatgacatcatggctatcgtaaacgaagcgacagacgaagcggagaaagcgccatacgcatctcctgaatcaacgcttgatcacgtttatgcgaagtagggaggaatacttatgtctgtaatgtcttatattgacagtattaatgcagctatgaaagaagaaatggaaagagatccgcgcgtttttgtcctcggggaagacgtcgggagaaaaggcggcgtatttaaagccacggcgggtctctatgaacagttcggagaagagcgggtgatggatacgccgcttgcggaatcagcgattgcgggtgtcggaatcggcgccgcgatgtacggcatgcgcccgattgccgagatgcagtttgccgatttcattctgcctgcggtcaaccaaatcatttcagaagcggccaaaatacgctaccgttcaaacaatgattggagctgtccgatggtcatcagagcgccttacgggggcggcgtgcacggcgcgttgtatcattcccaatctgtggaggccatttttgccaaccagccgggtcttaaaattgtcatgccttcaactccttatgacgcaaaagggctgttgaaagccgcagtccgtgacgaagatcccgtgctgtttttcgaacataagagggcgtaccgcctgattaaaggagaagtccctgctgatgattacgtccttccgatcggaaaggcggatgtaaaacgcgaaggcagcgacattactgtcattacgtacggattatgcgtccatttcgctctgcaggctgccgagcgtcttgaaaaagacggaatttccgcgcacgtattagacttgcgtacggtttatccgttagataaagaggctatcattgaagccgcgtctaaaacgggaaaagtattgctgatcacagaagatacgaaagaaggcggtattatgagcgaggtcgccgccattatttctgaaaactgcttatttgatttagacgcgccgatcaagcggcttgcaggccctgatgttccggcaatgccttatgcgccgacaatggaaaaatacttcatgatgaatcctgacaaagcggaagccgcgatgagagaattagcggagttttaaagacgtaaggaggtttttgacatggcgattgaacaaatggctatgcctcagctcggagagagcgtgacggaagggacgatcagcaaatggctggtatcccccggtgatcaagtgaataaatatgaccccatcgcggaggtcatgacggataaagtgaatgcggaggtgccgtcttcttttaccggtacgattacagaacttgtaggagaagaaggccagactcttacagtcggcgagatcatctgcaaaattgaaacggaagaaacggaaaccgaagaggcgccgaagcgggaagaagagcagaataccccttcagacaccgatgcaaaccgtcaaggtaaagaccagtcaaataaagcgcgttattcgccggccgtgctcagattagcgggagaacacggcattcagcttgaagaagttgaaggaacgggcgcaggaggaagaattacgcgaaaagacattcaaaagatcattgattcgggaatgcagcagaagtcggaagcaccggcgccggctgccgttcaaacaacgcaacaagcgccgaaacaacagcaaaaacaagcgccggcgccagttctgtcagccggtgatattgaaattccggttacaggcgtcagaaaagccatcgccgccaatatgcataaaagcaaaacagaaattccgcacgcctggacgatgatggaagtcgacgtcacgaacatgacggcgtacagaaacagcataaaagactcatttaaacaaaaagaaggcttcaatttaacatttttcgctttctttgtaaaagcggcggcgcaggctctcaaagagttcccgcagatgaacagcatgtgggcgggagacaaaatcgtccaaaagaaagacatcaacatctccattgccgttgccacggaagattcgctgtttgttccggttattaagcatgctgatgaaaaaacgattaaaggcatagccagagaaataacggaccttgcgaaaaaagtgagaaacggaaaacttaccgcggaagatatgcagggcggcacatttaccgtcaataacacgggatctttcgggtcagttcaatctatgggcattatcaaccatccgcaggcggcgattcttcaggtagaatctatcgtcaaacgtccggttgtcatgaataacgggatgatcgcagtgcgtgatatggttaatctttgcctgtctttagatcacagagtgctcgacgggctcgtatgcggccgtttcctcggacgcgtcaaagaaatcttagaaaacattgacgaaaatacttcagtctattaaaaaaactccttttgcccgggcggcaaaaggagtttttttattttcattgtgaatcctcgggaacaagcatagtgagatgatgttttttcacttcgatcgtacaaggcgttgttccgtatacctcgccatctgtatccgcgtccatttcacgtccggtttcgatttcaatcctggaggcctgaatataggacagctcccctttgaaatcatcaaacgaaccctgctccatcgtcatcagctcccgcaacgcggcaaggcttgtgttgcggcagattaacacatcggctaagccgtcccggaggctcgcatcaggcaggggaactctgtttgtcccgatataatgcccgttcatgacaagcaccattacggcttcgtcttctttcacctcgccgtcaattgtcaatttgacaggaaacgggttcgcacttgtcatcgtccgcaaggcgctcgtgaagtagctgattttaccaagccatgctttttcagtttcattgatatggctcgatgcttcggtgatcaatccgatgccccagaagttcagaaaatagccgtcatccgttttacagacgtcaatcatccgtttatgtccggccgcgagcgcttcagcggccttttgaaggttttgcgggatgccgagcgcccgtgagaaatcgttgcacgttcctcccggcaaaatgccgacagcgggcctgttatcaagcttgctgatgctgttgatgcattgatgcacagtgccgtctccgcctaaaatatataaatggtcaactgaactgtcgaggttttcacaatactgacgggcatcgtcctgatgtttggtcggtttaatcaaaagttcgtcagctgactgggccaaaatggggacgaccgtgccgagcgttttatcaatctgtttttgaccggcgtttccgttataaattaatactgctttccgttggctcatacgactgctcctttatttcagacaatctctttaacaagtttcccgtttttaaaaggtcataaacttacatcaggtacataaaaggaacaaaaaacaatttggatatgagcggtgtcatttgccgatagtgaggttccttgctatcataagaaaagatgatcaaaaaggagaggtcccagttgaatatggattttaatttatttatgaatgatgtcgtgcgtcaagcccgccaggaaatcacggccgccgggtatacagagctgaaaaccgctgaggaagtggacgaagcgctttcgaaaaaaggaaccacactcgtcatggtcaactctgtgtgcggatgcgcaggcggtattgcacggcctgccgcataccattctgtacattacgataaacgcccggatcagcttgtgacggtatttgccggacaggataaagaagcgacagccaaagcgagagaatactttgaaggctatccgccgtcctctccgtcatttgccattttaaaagacgggaaaatcatgaaaatggtggaacgccatgaaattgaaggccatgagccgatggccgtcgtcacaaaactgcaggaagcatttgaagaatattgtgaagaagtataagtgaaagaaaaaccccggagccgagcgcttccggggttttttatatggaatctgtataaatataaatatttatacaccggcgttcagctgtcactaatcggaaaaacaatgactataataaacagagaaaggaaaatatatttttcaaaaatagtattgcatcacaattaaaaagtgtttaaaatacaagttaacgaataaatattcaattttaagagatcagtagatatgggggaaatgaatcatgaagaaatggctgttggtattagctgccgcatgtatcacctttgcgctgtccgcctgcggatcaggcaattcaggctcagagggcggaaagaataagctgattatgggtacatcggctgactataaaccatttgaatataaagacggcgatcagatcaccgggtttgacgttgatctggcaaaagctctgggcaaaaagaccggctatgacgttgaggtgcaggacatggacttcaacagcctgattacagccttgaagtccaagcaggtagatatgattttatctggaatgacacctacgccggaacggaaaaagcaagttgatttttctgatatttattatactgctaacaatatgattgttacgaaaaagggaagcagcattaaatccctgaatgatctgaaaggcaaaaccgtcggtgttcagctcggctccattcaagaggaaaaaggcaagaagctcgcttcgaaatacggttttcagctcgaagaccgcaaccggatctcagacttaacggaagagattaaatccgggcgttttgatgccgcgattatcgaagacatcgtagcacaaggctatttcagttcaaataacgatctgcagggctttgcgtcagcagatgcgaaatcagacgaatcgggctccgcgattgcgttccgcaaagacagtgatctgacagcgaagtttaacaaagcgctgaaagaaatggagaaaaacggagaaatcgaaaaactgaagaaaaaatggttcaccaacgagaaataaaaggaagctcaacttttcgttgagctttttatcttgaataaagacaaaggagatcacacgtatgaatttggatttctcagcgacaatcccccaaattccttttatattggaaggccttgcggtcacattaaaaattgtgctcgtttcagcggtcatcggtcttgtattaggaatcgtgctcagcttatttaaaatcagcacgatcagtccgctgaaatggattgcggatttttatacttcgatattccgcggcacgccgcttgtgctgcagctgatgatcatctatttcggtatgccgcagcttctcggctttcagatcgatcaattttgggcggcggtcaccgcattatcgctcaattcagccgcttacgtctctgaaattatcagagcgggaatcaacgcaattgacaaaggacaaaaagaggctgccgtcgctctcggcgtgccgtacggaaaaatgatgaaagatctgctgctgccgcaggcgtttaaaaacatttctccggctattattaacgaattaatcaccttgacgaaagaatcggcaatcgtcacggtaatcggtctcggcgatattatgagacgggcctaccagtccggcgccgcaacatacaactatttagaacctcttattgtggcgggcttaatctattacgtgctcgttttgatcttagcattcatcggaaaaggcgtagaaaggaagctgaaagccaatgattaaggtcgacaacctgtcaaaatcattcgggaaacatgaagtactgaaaaacatttcaacacagatcgaagaaggggaagtcgtcgccgtcatcggcccttccggttccggcaaatcaacgtttctgcgctgcttaaatctgctggaaaccccgagcggcggaacgattgccattaaagaaaacgaaatcaccgcagctaaaacgaataaactgaaagtgcgggaaaatatcggcatggtatttcagcattttcatctgtttcctcataaaacggtgcttgaaaatatcacatacgcgccggtcagcgtgaagaaagagtctaaaaaggatgcggaggaaaaggcgtgcgctctccttgaaaaagtcgggctgcttgacaaacggaacgactatccgaaccgtttgtcaggcggacagaagcagcgggtcgccatcgcgcgggcgcttgccatgaatcctgacatcatgctgtttgatgaaccgacctcggctcttgacccggaaatggtcaaagaagttcttgaggtgatgaaagagctcgcgcagacgggcatgacaatggtgatcgtaacgcacgaaatgggatttgccaaagaagtcgcagaccgcgtattatttatggatgaagggacgatcgtggaagacggtcagccggaagaattttttctttctccgaagtcaaaaagagcacaggactttttagaaaaaatattataaaatataactgtaagaaaagaagaagaatgctcttcttcttttttttgagaaagaaacaaacagaatggagcaagcaatgtttaaaatcggttaccggacactaaagaccgcacttggaacggcgctggccatttatttagcccagctgttgcatctgcaaaacttcgcatccgcaggaatcatcaccatattgtgcatccagattacacaaaagcggtcgcttcaggcctcgtgggcccgatttgccgcctgtttattggcgatcgtcttttcatatgtctttttcggactgatcggctattatccgtttgcgatcggaatattgctggtgctgttcattccgactacagtcgttttaaaaataaatgaagggatcgtcaccagctcagtaatcattcttcatttatatatgtccggcggcattacgatggcgtttatctggaatgagttccagctgatcaccgtaggtatcggcgtcgcgctgttaatgaatctgtatatgccgagcctcgacagaaaactcgcagcgtacaggaaaaaaatcgaggacaacttttccgtcatcttcgccgaaatcgaacggtatttgttaactggtgagcaagattggacagggaaggaaataccggagacgcatcagatgattcaagaggcgaaaaacctcgcctatcgggacgtgcagaatcatattttgcgccatgaaaatctctactatcattattttaagatgaggcagaaacaatttgaaatcattgaacggctgctgccgaagattacctctatttcaataacggtggagcagggaaaaataatcgcccatttcatccatgaattaagggaagccattcatcccggcaataccgctcataaatttttaaaaagacttgcagaaatgagaacggaatttgaagaaatgccgctcccggcaacgcgtgaggagtttgaagcgcgggcggctttgttccacctcctcggtgagatggaacaatatctcgtgattaaaagttatttcaaaggcatcaagctgtaaaaaacatatggatcaatcgcatgagtcctcctttcattggtcattctaatgaaaaaaggaggggagcccatgcgattttttttattgtcagccgtcctgctgctgtctccgctttggccgcttggcgcgaaccctttgccgggtgacccttatattatcgtcaataaagccacaaatgcgcttgctgttgtaaaggataaccgaatagaaggcatttatcaggtggcgacgggaaaaacggatgatttgacgcctgaaggagaatttacggtaacggtcaaagccgtcaatccgtattaccggaagaaaaatgtagagggaggcgcgccggaaaacccgctcggcgtccgctggatcggttttgatgcgaaaggcaccgacggcagaatatacggcattcacggaacaaacagagaagagctgatcggggggtttgtatcaaacggctgcatccgtatgaaaaaccgggatgtcatccgtattttccggattatccctcccggaacgaaagtattgattacaaaagaaaaccgctcattcgaggacattgcaatagagcggaaagccctcataaaaaagcaggaaacccccttgcaatgaggcgcctgcttttttactgcaaatacatcataatgcctgagaggagggttgaaagtataaatacgcccaaaatgacgatgacggcgcttttcataaatttttgagacattgtttcactccttaagattactgtctaccattttaacgtgttttgcttatatgaacaagccatatcctatgggggaaagcaggtggccgcgctatgaaaaaacttgatcatgtcggcattgccgtcagctctattgaagccgcgagaggattttacgaacggatgctcgggcttacgtatatgggagacgagctggtaaacggccaaaatgtgagagttgcttttttagaagcgggaggcacaaagcttgagctgattgagccgctgtcggacgcgtctcccgtcagctcttttttacagaaaagaggcgaagggctgcatcatttggcattccgctgcgccgatatgaaggaaacgatcaaggagcttgaatcatgccgcatgaccttgcttcatcatgaaccgcaaaacggagcgggcgggaagaagatcgcatttctctctccaaaagaggcgaacggcgtcctgattgagctttgtgaaacaattgaaaaaggagaaactcaagatgaacatgagtgatcatatcagacacttaaacgaaagacgttcctttttaacaaacggcggcggagcggaaaaaaataaaaaacagcacaaaaaaggcaagctgacggcaagagaaagaattgactatctattggacgaagacagtttttcagagctgcagccgtttgccaaaagccgcacgcccgggtgccagaatgctccgggagacggcgttgttaccggatacggcacaattgacggacggcccgtgtatttgtttgcccatgactttaccgtactcggcgggacgctcggcgagacgcatgcggaaaaaatcgcggcggtaatggatctggcggcgaaaaacaaaaacccgatcatcgggctgaacgactcaggtggtgcgagaattcaagagggtgtggtatcattaaatggatacggtcatatctttaggcgcaacgtcctttactcgggagtgattccgcaaatttctgtcattcttgggccgtgtgccggcggtgctgtttattcacccgctttgacggattttgtgattatggcggaacatacgtcgcacatgtttattacaggtccgaaagtcattgaacaggtgacgggtgaacagattgacgcggaaagtttaggcggtgcgggaatacataatgtgataagcggaaatgcccactattccgcacgaacggaaaaagaggcactttcggctgtgaaaaccctgctttcttatctcccgcacggcggacagacggcactacccgttaaaaaggaagacgccagaccgttattaaacaccctcgttcccgcggacagttcgaaaccttacgatgtgttacaggtaataaaagagctggcggatgacggaacgttttttgacattcagccgtattttgccaaaaacattgctgtcggttttctgaaactcggacggcgtacagtcggtgttgtcgcaaaccagccgaaacacttggcggggagcctcacgattgatgccgctgacaaagcgtcgagattcatccgtttttgcgacgcgtttcatattccgctattgacgatcgctgatgttccgggatttcttccgggccttcagcaggaacatgcgggaatcatccgtcacggagcaaaattgctgtatgcttttgccgaagcggcggtgccgaaagtgacgctcatcatcagaaaagcttacggaggcgcttatgtcgccatgaattcgaaagggctcggagcagatcttgtattcgcctggcccaatgcggaaatcgccgtgatgggagcggaaggcgcggcgtcgattttatacagcagagacatacaggcttctggggacccggagaaaacgaagcgcgaaaaaaaagccatatacgaaaaggaaaacgccggtccgtataaagcggctgcctgcggtatggtggatgatatcatccggccggaagactcgaggaaaaaattgattcaggcatttgacatgcttgcgcataaggaagaggaaagaccgaaaaaaaagcacggtaatataccgctttaaacggagggaactgaaaatggtaaacgaaaaacgtctgcttgaagaatttcttgaactcgttcaaattgattcagagacaaaacatgaagcggaaatcagcaaggtgctcaaacaaaaattcactgatttaggattgagcgtaaaagaagatgatacaaaagaagtgacggggcatggagccggcaacttaatctgtacgttaaagggcacaaaagatgcggatacgatttattttacatcccacatggacacggttgttccgggcaaaggcgttaagccgattgtggaagacggctatgtaaaatccgacggcacgacgattctcggcgctgatgataagacgggccttgccgcaatgtttgaagccattaaagtgctgaaagaacaaaacatcgagcacggcaccattgaattcattatcacggccggagaagaatcgggattagtcggggcaaaagcaatggatcgttcagacattaccgcgaaatacggttttgcgcttgattcagacggaaaagtcggcaacattattgtagccgcgccgacacaagcgaaagtgagagcaaccattttcgggaaaacggctcatgcgggtgtagaaccggaaaaaggcatctccgcgattacaatcgcatcaaaagcaatctctaaaatgccgctcggccgtattgataaagaaacaacggctaatatcggccgtttcgaaggcggcacgcaaaccaatatcgtctgcgaccaggttgatattctggctgaagcgcgttcattagtgcctgaaaaaatggaagcgcaagtgcagaaaatgaaagaagctttcgaatctgctgcagctgagatgggaggccgcgcggaagtggacatcgcggtcatgtatccgggtttcaaatatcaggacggcgatcaggttgtggaagtcgcgaaaaaagcggcggcaaaaatcggccgtccgagcgaacttcagacaagcggcggcggaagtgacgcaaacgtcattgccggccacggcattccgacagtcaacctgtcagtaggctatgaacaaatccatacgaaaaatgaaaaaatgccgattgaagagctcgtcaaaacggcagaaatggtcgttgccattatcgaaacagcggccaactaaaaacgaagcacccagttgattgggtgcttttttcattcttcatgatattaggcttaaagctttgcagatacaagaaaaaaccctgccggataggttccggcagggtttcagtattatgatttggcgggctccgcctgagccgcagcctgtttctttttatgatgcgtctgctgtaaaagtacgttctgcactgtcaaaaacagtccgcttgtaaaccagtaaagcggcagcgcagccggtacgttaagcgaaaaaacggtcatcatgacagggaaaataaagaccatgatttttgctgactgcatcgcggccggattttgagcagccggtgaatatttctcgtttaatttttgggaaatataagcctgtaagaaatacatggcccccgcgcacagtgatacaagaatatcagaatgccctaagctgaaccacagaaatgagtgtgaagcaatttccggcgttgagcggatggcgtaataaaaaccgatcaaaatcgggaattgcaccagcatcggaagacatcccattgccatcggattcagattgtgctcacggtaaagcttcatcatttccatttgcagttctttttgtttttccgcatctttcgtttgtttcattttagcctgaatgctgtcgacctgcggtttgatcacagccattttttcctggaacacccgctgtttcttaaattggttcacaaacaaaggcaatacaacgatccggacgataatcgtcaccagaataatcgacagtccgtactcaccgtggaacaggcccgccaccccttttaaaagtgccgaaaacggctcgatcaggtaatcgtggaaaaaaccgatattcccgaggcctcccgtctgagtctgagatgtcgccgcaaaagccgagcggcctgtgcacagtacgataaaaaataatcccaatacgatccacttttgatatgttttagacaattatgtttcctcctttatatcttcacttgccgttataaaaggaggaagctgacatcttcatcatcattcgccggtgaattcatgcggatgactttacgtatccaagttgtaatgcgatgatatataataataagaaagtctgttcggttcagctgaacgactgcttgatgttcatctattcgtttcgttctccaatgctcgcctgcgcggcgctcacgcaaaagaaaagcgatgccgatcgcggtcagagcgggaagaataattgtgaaaaaatcgactaaaaataaaaagtcattcattgactcaagaatcattttatcacatccattcagctcttattttactacatatatataaggttgtctatgaaaggaaaggaggcgccgggagtggccggaaaagggagaattatatttcatatcgatatgaacagtttttatgcctccgtagaaatggcgtatgatccgtctttaagaggaaaacctatcgccgttgccggaaacgtgaaggaacggaaaggaatcatcgtcacctgcagctacgaagcgagagcgcggggcgtaaagaccaccatgccggtgtggcgggcaaaacgcctctgtccggaactcatcgtcgtgcctccgaattttgaccgctatcggagttcgtcaaaagaaatgttcagcattctgagggagtatacggatttagtcgagcctgtttctattgatgaaggatacatggatattacggacacaccgcacagacacagggcgtatgagacagccgcagacattcaggcgagactgcaaaaagagcttttgctcccgtcaagcatcggcatcgccccgaataaatttctcgctaaaatggcgtctgacatgaaaaaaccgctcggcatcaccattttaagaaaaagagagctgccggacgtcttatggcctcttccgatagaagagatgcacggtataggaacgaaaactgcggaaaaaataaaaacgctcggcatcaaaacgatcggtgatttggcaaaaggagatgaacatgcgctgaaaacgcttctcggcataaacggcccgaggctgaaggataaagcgaacggcatccatcctgcagaagtcaatcccgagcggatttatgaatttaaaagcgtcggcaactcatccaccctgtcgcatgattcggctgactgggatgaattaacgggcgtgtttgaccggcttgcgctgtctgtgagcgaacggctccagcgtaaggaggtcatggcctgccggctgttcatcatgattcggtatgcggattggaaaacggtcacaagaagcatgaccctcagcaatccggctgatcagaaaaaagacatcatggaagcggcgatggaactgtttgacaagcactggaaccaaaacccggtaaggcttctcggcatcaccgggacggaactggttgaaaaacagcaggcgtataaacagcttgatctgttttcattcaaggaggacgcaaaggatgagccgatttttcagatgatgaacgagctgaatgaaaagtacggccaaaacctgatcagaaaaggcgccgttataaaaaaagaagaaagcaaaacaaggggcacgagctttaacagagacttttttcaggatgaaaagaaaaggtgaataacttgaaaaaaggggttatgtatgataatttctttagtataaatatcattttattttaatttaaattttaaaatggttaaacgtttgaagaagggacgttagaatatgtcaaaacaacaaatcggagttatcggtcttgcggtaatgggtaaaaatctggctcttaacatcgaaagccggggattttctgtgtctgtatacaacagatcaagcagcaaaacggaagagtttttagaagaggcaaaaggtaaaaatgttgtcggtacatacagcattgaggagtttgtccagtctcttgaaacaccccgtaaaattttattaatggttaaagcgggaactgcaacggatgcgacgattcaatctcttcttcctcatctggaaaaagacgatattttgattgacggcggaaatacatactataaagatacacagcgccggaacaaagagcttgccgaaagcggcattcactttatcggaacgggtgtatcaggcggtgaagagggagcgctgaaagggccttctattatgccgggcggccaaaaggaagcgcacgaactcgtaaaaccgattttagaagccatttctgctaaagtggacggggaagcttgtacgacatacatcggcccggacggagcgggacactatgtgaaaatggtgcacaacggtatcgaatacggtgatatgcagctgatctctgagtcatatttcattttgaaacaggtgctcggattgtctgccgaagagcttcacgaagtattcgctgagtggaacaaaggagagcttgacagctatctgatcgaaatcacggctgatattttcactaaaaaagatgaagaaacgggcaaaccgctagttgacgtcatccttgataaagcaggccaaaaaggaacgggtaaatggacaagccaaagcgctcttgacttaggcgtgccgcttccgattatcactgaatctgtttttgcgcgtttcatttccgcaatgaaagaagagcgtgtgaaagcaagcggccttctgtccggaccagacgttaagccggtcactgaaaataaagaagagctgattgaagcggtcagaaaagcgctcttcatgagtaaaatctgttcttacgcacaaggcttcgctcaaatgaaagccgcgtctgaagaatataactgggatctgaaatacggtgaaatcgcgatgatcttccgcggcggctgtatcatccgcgcggcgttcctgcaaaagatcaaagacgcatatgaccgtgaaccggagcttgacaacctgctgttagacagctacttcaaaaacattgcagaaagctaccaaggcgctcttcgccaagtgatttcacttgccgtagcccaaggcgtgccggtaccttcgttctcaagcgcacttgcgtattacgacagctaccgtacggcagtgcttcctgcaaacttgattcaagcgcagcgtgattacttcggcgcgcatacgtatgaacgcacagataaagaaggcattttccatactgaatggatgaagtaatgaagaagcccccgcattgattgcgggggcttttctgatattaaaaaccgcgggccgtcatgaacggcgccgcggtttttaaattttttcttatatattccaccagtggagaccgtctttttcaagaagatcgtccgaagctttcggtcccattgaccctgcttcataattcggagaaagggttttgtcggctgcccacgtttcggaaatcgcatcgacgaaattccaggaaagcgccacttcgtcccaatgggcaaagtttgtcgcatcaccgagcagacagtcatggattaatttttcataggcttccggtgtgttcatttcatcactgcagttgctgcagtagtccagcttaatcggctgagcatgagcggctccgcctaattttttagcgttcagatatagtgtgatgccttcatccggctgaatatggatgacaagcaggttcggatttacattcgtttcattgccgtaataaaggttcatcggaatgtctttaaattgaacgacgattttcgttgatttttctttcatccgtttccctgttcggatataaaacggaacgccggcccagcggaagttatcgattaacagctttccggacacgaatgtttccgtattggaatccggtgctacattatgctcatctgtatagcttggtacagagtttccgtcaatcgttcccgcttggtattgtccgcggacgaagtagtcactcacttcgtttggagcgacagggcggagagctctcagcaccttcactttttcgctgcggatttcttccgtgttcagtttaatcggcggttccatcgccaagagagcgaccatttgcaaaatatggttttggaccatatcacggagtgcgcctgatttttcataatatctcgcgcggtcttcaacgccgagatcctcgcttgacgtaatctggatgtttgagatgtagcggttattccacagcggctcaaacagcgcattcgcaaaccggatgacttcgatattttgaaccatttgtttgcctaaataatggtcgatccggtaaatttgatcttccgtgaaagcttcgcgtatttctttgttaagctctttcgcactcggcaggtcatggccgaacggtttttcaatgacgagacgggaccagccatttgtcgctgtgacaccttcgtttttaagtgattttgcgatcgtgccgaaaaactcaggagccatcgccaagtaaaacattctgttgttcgggatttcatatgtatgttcaagctgatcaagcaggacattcagctcctgataggaacccggattcgttacatcaaacggatggtaataaaaatgagatgtgaaatcgtctatgtctttttgcccggcagaagaaacagacgttttaaccgtttcccggaggtcctcgtttgaccaaggtcttcttccaacacctacaactgcaaactcttcaccaatttgaccatttttatataaacggtgaatggatgggtaaagttttcgttttgccaaatcccctgtggcaccaaatattacaattactgcttttggtttgtcgtttgttttcacttagagtacctcactttatctgaagcatggtttaaaaccccgcatatttccttcattttaaatctaaaattcattgaaagcaaacatttcagcctgttttttgcggtttgcggaaaaaaattaatcaggccggagaaggcccgggtgaattcacattttcagtctgatcctgtatccttagtagtacaaagatctaggaggaagcattgtggaattattatttttagggacgggggccggcatgccggcaaagacgagaaacgtaacgtccgtcgcgctgaagcttcttgaagaaaggcgttccgtatggctgtttgattgcggagaagccactcagcatcagatattacatacaacaatcaaaccgaggaaaatagaaaagattttcatcacccaccttcacggcgaccatgtttacggtcttccgggtctgttggggagccgttcatttcagggcggtgaagaagagctgacgatttacgggccaaaaggcattaaagcctttatcgaaacaagcctgaacgtgacggcgactcatctgacgtatcctcttaccgtacatgaaatcgaagaggggacggtttttgaagatgagcacttcattgttaccgcagcatccgtcattcacggtgtggaagcgttcggctaccgggttcaggaaaaggatattcccggcgcattgcaggccggcagattgaaagaaatgaatatcccgcccggacccgtctatcagaaactcaaaaaaggcgaaacggtcacacttgacgatggcagaatcattaatgggcgggattttctggaatccccgaaaaaagggagaatcgtcgctttttccggggatacgagggcatcagagcgggtaacggagcttgcgcgcaatgcggatgtgcttgttcatgaagcgacgtttgccaaggaagatgcaaagctcgcacataattattatcacgcgacgacagaacaggctgcgcaaacggcaaaaaaagcaggcgccaaacagctgatcttaactcatatcagcgcaaggtatcagggtgaatcgccgatagagcgtctcgaacatgaggcgaaagcggtatttgaaaacagtaagatcgcatttgacttcatggaggtcactgtggagcggtcttaaaaaatagacgcttgacatttttttctgatgatatataataaaacgtaataattacgatttaaaaaaggggtgaaaatgatgcgtgtgaatgttacattggcctgtacagagacaggggacagaaattatatcacgacgaagaacaaacggacgaatccggaccggttagaaatgaaaaagtattcaccccggttgaaaaagtatactttgcatcgtgagaccaaatagatcacgataacaaaagccattgtgccgttgcacaatggcttttgttttcatcagtttaccgcctgataggcaggagcattcatttgctggcgcaccgcgcaccaaacatcataaatggcaaggtggacgatgtgcggttcatcgtgatgaatggcatgagaactgtttttggcctgaatccatccgctttgataagagacatcaagcatgcttctgtgcagtttcacccattgttcatgagcgtgctttaagcgctcatcccgctctcccgatgataaaatcaacagcggcatatcgccgaaatgaatctgctgatgctggatctgcctaaggctcgttaaaaattctgcgtgtgatccttccaatttgaactgtttcaaataggcggccttcatttcttcaggaagaagcggaagcactttcgtctcctgatcctcagaaaccggatcaagcagcaccatcccgagaatatcccggcggttccggctcgcccaaagtctgctgataatcgtgccgtatgaatgcgagacgacaaggtaaggaggcttgacgccggccttcagaagaagagcgcttaattcctgtaccatatggtccgccgttctcttgtttcggcttcgtccgcttttgccgattccggctctgtcatatgtgaaaaccccaaattcttcatctatgtcagcgagtaatgatgtccatgtttcagaagaagtgccgtagccggcttcaaagacgatcgtcacttcgccggcgcctttacggtgtttcgtataaaacggacacccgtcaatcagatatgtcctttccatccatgctgctttcattggagtcatctcctctaattggttctatagggaagacggagaagcttcggcaatcgtttctcgaaaaataaaaaaagagacagccgggatcgaaaaactccggctgtcacttcatcaccatgctctgtcgtattggaccggtgacggtatttcagtattcagctgcttcgctgcactccttgcaaagtgcggatcgcggagaagttctctcgcgacaaaaataaggtcagcgcggttgttgtgcagaatttcttcggccattgttcccgtcgttatcaaaccgacggcgcctgttgcaatttcggcctgttcacggattttctccgcgaagctcacttggtagccggggaagacgttaatatcagcttgaacgagtgcgcctgagctgcaatcaatgaggtcgactccctgttctttcatccacttcgcaaaaccgatatgatccgcaatgtccagccctttgtctgtataatccgatgcagaaatacggacaaataacgggccgtcccagacttccttgacggcttcaatggtctcgcctaagaagcggtagcgattttcatgtgagcctccgtattcgtctgtacggtgattggacagaggggacaaaaattcgtgcattaagtagccgtgtgcggcatgaagttcaatgatgtcaaagccggcttctttcgcgcgcgccgctgcctgtttgaattcctgaatggtttctttaatttgttctgtcgtcatttcagccggtgttttggactgctcatcgaacggaatggctgacggagcgtaaatgtctccctcaagctcagctttacgtccggcgtgcgcaagctgaatgccgattttagatccttgcgctttcacttgttccgtcagtttggcaaaaccttcgatatgatcatcgctccagatgcccaaatcctgatcggaaatgcgcccctgaggattaacggctgtcgcttccacgataatcaggccgacctgtccgattgcacgcgatatgtagtgcgccatatgaaaaggctgcagttttccgtccttctcatgtgaggaatacatacacatcggtgccataacaatacggtttttgatcgttacatctttaacggtccatggtgtgaataattttctcgccatttatttcgcctcccggaatgtttttcgacattgattataacaactcatgatcattcagtcatataaactgctcacaactgaacagatcgttcttattgttctggacgggcatttttttatacacagcgtggccgtatcttcataacaggcatttacagccgatcatatagcaaatatagatgagaaacgcaccgatgactgcgtggcctcctttgatccagtttgtcaggatgaaaatactgctgatgaagatcactgcgccgaaggcaccgaatattccgtttttttgagcggctctgaaatcgtcggggctcatatttttcagctgcaagtgaatattcagtaacgacatgatcggcagcaatgtgataacgcctgataaaaataagtatttcgacttgcttaaatacgcggcggccaccataacggtgccgccgataaaaaattgaatgagaaaactcatgctgaaacgctcaccttctgtttgttatcaagtataatgatggagacattgccattttatttttgattgatgtataagtaaactaaatataactaatgcattggataataaagaatgatatctgggagatgaagccgattggatttaaagaagcatttagcctttattaaaacggtagaaagcggcagcctgacccaagccgctgccatattgaattacacacagccgaacatcagccaaatgatcagtaaattagaggaagagtacggttttccgcttttgatcagacagcggcatggagtgaggcccaccgcaaatggcttgaaagtgttacatattatgaaggaaattcaaaaaaactatgaaaaactgtctcaaaccgttgataatattaatgggttagaaagaggggaagtccggctcggcactgttacgagcgtggcggtaaaatggctgccgaaaattttgagggaatttaatgagctgtatccttctattaaggtgcatttatttgatggaaattctactgagctggaacaatggctgaaagatgaccggattgatgcggcgattgggacatcccacagcgagaagtggcatttttacccgttggccgaggacccgattgtagcggtgatgagcccgcagcatgaattggcgcaatatgaaacggttccgttacatgtcatggagtccgtcaaatgtatcgtgccttatccggagacacattttgatgtgctgaaagtgttaaaggaagaaaagatcactccgcgggttgcttatcaaatcagaggggatgaagcgattattgcaatggtgcggaataatctggggatcagcatcttgccgcagcttttggtgaatgatggtgatgtgctcatcaaacggttcgaccggtatgtctccaggcagctcggcattttgacagctcgtgcaaaggagacgcagacaccttctgtccagaaactgattcaatgcatacaagaatgggttgcggtccatcaggcttctgcctgaagaagcctgatatgcgtttaagccggttcaggataatagaccagcaataaatatgtcatcggttccgaggaatgaaaataactgtgcggcatcgcccgaagtcagcacatgcttttcgtcatgaagctcaaccgtcaattcaccgctcttgattaaaatgattcccctaaatgtgattttgtctcataggcgcagcccggcttcaggtcaactatgccttgaaaacaaaaatttgaccgtgacggtggtgagcggggttattttgatgtcgggctttcgtctgtttatataaaaagggcatcaacggcacatgctgttgatgctttttttgaaatgctagggtttggagagcacttcaattccgacgttgaccattttgtccagccccataaaagacaggcagattttggcgcgtctttttcttttatcgatttttttaataatgccttccattcctttaagaggccctgaggcaacggttacttttgaattttcaatatagacttttgaataatctacagtgtctccttctccgatcagcctgataatagggaggatttcttcatccttaattgtcgtgaaataggttttgcgctctttggaataatatgctccgttattcacgattctgcatgaaatggggagttctttgattttatgaaatgtccgctctgtcatctttgttttaaacagaacatatcccggaaacatctttttgagtgcctcgtatttaattccggcttttcgttctgtgacttttttcttgggtatgattgagtagagagcctgctcatcaaactgcagacgcagaaatttttgaactgcttcttcttttcccgactctacaaaaagtgcgtaccatttcatgactggatcctccttagaataataagaaattattatacaaagaaagtatttaatggatagtatttaaagtgattaaaaatttttctaattcgtcttttttttacataatatatgaaaatgaaaaataagtatagacccaattgacagagaggcgatgaattttctttgacatgaaaagggttcagggaattatctgacatttatcccgaaacaattatgccgactgtccaccgaatataaaactgtggaataaatgtcagaaaataacgaaataaagccttgacattattatctataaattgatattattctctttaaatagcaactatttgttaaatttattaaattaaagtaaagcacctattaaatttcaatcgctgtttcggcacgttgaagaggaaatagggattataaaaatgattgcagtgtatatatctacatatacatgataagggagaagtgtgccgtcatggctgttttcgggcatattggcactgcagcttgtcatgcgaaacattcagtaaacaagcaagatgttttaatataaattatgttagaaaaggaaaacacaatgcgtttgcgatttttaaacctgtgctgaatcgcaaacgcgtttgtgtttttatttttatggcggtgtttacaccagtcaatatatgaaataagagacgtttttgtatggagaaccacatgtgatgtacaaaattggcgatggggaaaggatgaggataagatgcttacgtttgtgttcccggggcagggttctcaatttaaaggaatgggagccgggctgtttgatgaatttcaagatctgacacgtcaggctgatgacatattaggctactctatagaagaattgtgcctggaggatccgaatcatcagctggggaaaacgcaatttacccagccggcgttatatacggtaagtgcactcagttatttaaagaagattaaagagtccggcagagagcccgattacgccgcagggcacagtttaggagaatataatgcgttatttgcggccggctgctttgattttaagaccggtttgcagcttgtgaaaaaaagaggggagctcatgagcaaggcagctcccggaggcatggcggcggttttggggtttacggctgaacaagtaaaagaggttctatccgattatcatctgaccggcattgatatcgctaaccacaattcaccttcgcaaattgtgatcgccggaacgaaacaagacattcaaaaagcgggccccgcctttgaaaaagccggcgtgagaatgtatcttcctttaaatgtgagcggcgccttccattcccgctatatgaaagatgctgaaaaagagttcgcggattatttagaagaaacggcgtttttgcctcttcgttttccggtgatctcaaatcttcatgccgcaccttataagaatgatgaaatcaaaacaaatctgactttgcaaatgaccaatcaggtaaagtggacggacacgatacgccgtctgataggacttgaaaataatgaaattgcagaagtcgggcccggggaagtgctgacaaaactgacgaggcagattaaaaaagatgccgtcccattacctatgccgaaagaagagtctgatactgctgatgttaaagcatcggcagctgattcccaaaaaacggcgggaatgagattagggaacgaagattttaaaaaagattataacatccaatatgcttacatgacgggctccatgtacaggggaattgcttcggaacagatggtcattaaagcggcaaaagcgggaatgctgggctttttcggaacgggcggattgagtatcgaacggatcggacaggccatcggaaccatccggtctgcactgcggcaaggggaaacattcggaatgaatcttcttcatcatatgatgtcacctgacaaggaagtcagaatgatagatttatatttaaaaaacggcattcaccttattgaagcatcggcatttatgggcataaccccggctctcgtgatatacagggcaaagggattaagcaggaatcatgacggatcggtgtcagtccaaaacagaatcatcgcgaaagtatcccggcctgaagtcgctgaggcctttctgaatccggctccggctcatgtgctggaaagacttgtgtctgacaatcggctgacagccggggaagcggcgcttgcaaaagaaattccgatggctgatgacatttgcgttgaagcggattcaggagggcataccgaccaagggattccgtatacattaatgcctgccatgatcagactcagagaccgcatgatggagaagcacggttatgcgaaaaaagtaagaatcggcgcagcgggcggcatcggcactccggaagcggctgctgccgcgtttctgctcggcgccgaatttatcggaaccggttctattaatcaatgcacggtcgaagccgggacaagtgattcagtgaaagatctgcttcaggaagcgaacgtgcaggatacgtcatacgctcccgcgggagatatgtttgaagcgggagcaagggtgcaggtgctgaaaaaaggcctgtttttcccggcaagagccaataaactctttgacttgtacagacaatacaattctttagatgaaatagatgaaaaaacgaaaacattaattgaagataagtatttccagcgcagttttgaggaagtgtatgagcagttgaaacgtgataaatctcctgaacagatcgccaaagccgaacagaatccgaaacacaaaatggcgatggtatttaaatggtatttttcccatacgacgaggctcgctctggaaggaaaaagcgaaagtaaaatagattaccaaattcattgcggccctgcgctcggcgcgtttaatcaatgggtgaaaggaacccctcttgaaaattggagaaacaggcatgtcgacttgatcggcaaacagctcatggaagaaacagccggccttcttgcgcaaaggctggtatcgattacaggctgagtatgaccagacattacattttttctgcggaggactaccatgctgattgaaaatcatgaattaacgatgagccatgtcggattagggaatttgaatgagtacgcgctgctgctgttattcggcaatgcacacagtcaccatttaacggacggaacgggattccggcctgatcagatggccgatcaccaagggctgattttgtatccggcttattttatgacacatctcaaagttccttcagataagcctcttgatcagtaccgattatgggacgaggtttccgtcggagtcgatatctcccggtttggagaaaccatattagaatctgattatttgttcgggccgaaaggagcggtcagctctgataaaagcgagtgggaccggggacggtttccttctatgaaagccaatagtttaattgtcgttgacgtcacacaaacagaaggttcgacgcgcaaagtctcagcgccgaaggctgaatgtattgcggaactttctaagctagccaagccgccttacgcgctgatgcggtcaaagaaagtcagaacggacgctttcggtatgaagccgggaaacctcaaaacagcggaccccgtttcatatcgggttcctgttgatcaggatgctgcgccggggcatgccatggtgtttgcgaaattcagcaagataatggatgcggcggaatttgaatggatgacgcgccggtcgaagccgggttttccggtttcaatcgcgcggcatttatttttgcttgaaagagagacgtattattacggaaattgttttgcagatgaagagcttgatatttatatgacgggacacattgaagaatgcgatcccgactttcacggtgagtccctcggtatgatctcagtggcgaaaatcagctatcagattgaagtctatatgaaaaggaatcatacattgctggccatttccaaggtggataagctgctggcggtgccgacctcttcacaagatcatattccggattataaacgggtcatcagaagtttataaaatgaagaatggagctgaaagcaaatggaacaaaccaaggaaatgaagcagatcatcgctcaaattattcaggatattcaagaacagcagtcatatcgggccgtcgaagcgggagatgatgtgagagtcatagaggatctgggcttctcatcactggatatcgctcaattagtcgcacagatggagatggaaaccggagtggatcctttttcccaaggagaaacgatttccagcattacaaccgtcggcagcatttgtgatatttatcaaaaatacatggacagtgctcaatcatgaaaacagaaagcaggggagatatcagctgggtgactgataagcttagggaaacgcaggacagtgagtttctcatttttaaagggcagacttttacgtatgatgatttgctgacacgaatcagcttttttcagaaagaacttgaacaaaacggaatacgtgaaggagaatgtgtggcgcttatcggggattattccccgaacgccatttttttgctgatggcgcttttgttaaaccgaaatatcgttgtccctctcagcaatgaatcaagggaaaagcatctcgatatgtttgaagacgcgaaagtgaatcaaatcattgaaataaatgaaaatgacagctggacgcttcgtgaaggttctgaaagcgcctctcaccctctgcttgatgacctgcgcgagaaaggggagtcaggcattattattttcacatcgggaacctccggcaaaagcaaagcatccgtgttaagcgccggccggctgcttgaaaaatacaaaacggcgaagagaaaaccgctgcgtacgctcatttttctgaaattggatcatataggcggcattaatacgctgtttgcgattctgtttaacgggggaacgatcgtcacatcagacagcagaacgccggagtccgtttatcaggcggtcgacaaatatgctgtccaagtgctccccgccacccctacttttttaaacatgctgctgatgtccaaggcggatgccggctataacctgtcttcactccagctgatcacttacggcacagaaccgatgccccaatcaacgctgcgcggcattcaccggctgtttccggatgtacggctgaaacaaacatacggattaactgaactgggtatattctcaacgaaatcaaaagacagccaatccacttggatgaaagtaggcggtgccggaacagagaccaaaattaccggaggcacgctttgggtccgttctgagtcggcgatgctcggctatttaaacgcaccctcacctttcgatgaagacggctggtacgacaccggtgaccaggtggaaacagacggcgaatatataagaattctcggaagaaagagtgaaatcattaatgtgggcggagagaaagtgtttccggcagaggtggaaagcgtctttctggagatacctaatgtccgggatgttctcataacgggccgaaaaaatccgattacaggcgagattgtcgcggcagaggccgtacttgaaaaagaggaagatatcaaatctttcagaaagcgggccgtagctcattgcagacagaagctgcagccatatcagataccgcagatcatctctgttacagatcggaaactgtctaatgaccgatttaaaaaaataagaaacgtataaaacaggaggcaaatatgaataacggaaaagtagcggtcgtcagcggaggtagccgggggctcggaaaagcgattgtacaggcgcttttggatgagaattacaaagtagccgctttcagccgcagtgaatctgattttattaacacattgagagagagtgaaaagtaccgtgaccgcttttattgggaagcggcggatgcggcggatgatgccgccatgaaacagtttgttcttcaagtgtaccgcaagttttccagaatagacggcttggtcaataacgccggtttgaaccttgatcagctgctgcccctgaccaatgatgaagacattgaccgcatcctcaatctgaatatcggttcagtcatcaagctgacccgaaacgtttcccgggtcatgctgaaacaaaattccggatcaatcgttaacataagctccattatcggttcaagaggatttaaaggcacttcagtctacagcgcatccaaagcggctcttgacggcttgacgcgaagcctggccagggagctcgggtccaaaggaatccgtgtcaattcacttgcgcccggttttgtggacaccgatatgacgaaaaatatgccggaaaaacaaaaatcgcagattatcagaaggacgccgatggggcgtttaggcgaaacagacgatatgaccggactcgttcgttttctgctttctcctgaatcgtcctttatgaccggacagacaatggcaatagacggcggattaacttgttaaagcacagaaaaattcttttgtacaagggatggtatcctcatgaaatgtattaacgaatttttaagaacggtaatagcggaaaagctgggtgccgaggtgaccgaagcagaagataaaaccgctttttttactcttggcgtgacgtctctcatcagtgaagaaatcatgaccatattgcataaagaatttaccggcctttctgaaacgctgctgtttgaatatccgaacattgagaaattgagtgagtttttaagtgcgcagaaacgaaatcccgaaagcgttcttgaattcaaagaaacggagcctgatacgggaagccggcaggaagaagaagtgcttcctgtacaggcggctgaaaaggtgcctgaaccgggaacggacaggagttctgatattgcggttatcggaatgagcgggatgtttccgaaagcggaaaaccagcatgatttttgggacaatttaatggaaaataaagattgtgtctccgaaatccctgaggacagatgggacagctcttattactcggaagagaaaacggcaaaatacgcgtcatacagtaaatggggaggttttattgatcgtccggatcgatttgacccgctgtttttttctgtttccccgtgggaagctgatttaatggaccctcagcaaaaattgtatgtcacgtgctgctgggaagcgatggaggatgccggttacgggaacccggcggcgaggccgacggatcaaatcggtgtattcgccggagtgacctggaatgaatattcattaattgcacacgaagaaggtttcctcaaagatcagtataaaggccccggctccttatattggggcattccgaaccgggtttcttattttcttgatctccatgggccgagcatcgctgttgatacggcgtgttcttcatcgcttgtcgccgtccatcaggcttgtcaggccattatgtcgggcgactgtgaaatggcgcttgccggaggcgtcaacctcagcttacatccgcaaaaatacatgtttttaagccaatcgcattttctgtcttctgaaggaaaatgccgcagcttcggtgaaggcggagacggttacgtgcccggtgaaggcgcgggagccgttttgttaaaaccattgaaaaaagcgattgcggacaacgaccacatctacggtgtcattaaggggtccgccactaatcacggcggcaaaacgaccgggtatacggtgccgaatccggaagcgcaccgggacctgattttatccgctataaacagagccgcggtaagtccggcggatatcagctacattgaagctcacggtaccggcacggcactcggcgatccgattgagatacgcggtctgtctatggcatttgagaaacagaccgatgagaaaaatgactgcggaatcggctcggtgaaatccaatatcggacatttggaagcggctgcagggatcgccggtttaatcaaggtgcttttaagcatgaaacatgaaacgcttcccgccagtctgcacgccgaggaactgaaccgcaagatttctttttctgattcgccattttatgtcgtccgaaacaatcggccgtggccggctgaaggagataaaccgagaatcgccgcaatcagttcattcggcgcaggaggctctaatgcccatctgatcgtaggtgcttatcagccaaaacggcaagcggacgggaatactgagcaaaaaccgcatgccgtcgtactaagcgcacattccgaacagcagctgaaagaatatgccggaaaattgagctcctttcttgcccgattggaaaactcgccttctgccggcggatacagcctggaaaatatcgctgccaccctattgtcaggcagagagcctttctccttccggcttgctgtcattgcgtcatcccttcccgagctgaaacagcgattggacggctttgtgagcgggcacagcggcggcaggcatatttacttcggaaaagcgtcacccggacggccggacgtttcaggccaatccgtttcagatcctgaaaaatttgccgcgctgtgggtcaaaggccttcaaggtttcaaaaagccggagacgccgtatcagaaagttccgcttcctacgtatccgtttttaaaggaaacgtcctggctgaccgaccaaaaaaagcggtatacgaaaaagccccaatctgtcaaaaggcgtgaagcgctgcatccgctgcttgatgagaatgtttcatccgcccggaaagggacgtttcaaaagatattttccaaggatgaatatttctttaaagatcatttagtgaacgaaaaatatgtgctccccggagtctgtcatcttgaaatggcggcatacggcgcggcattgtggggagaacgcccggtcgtctctcttcaaaatgtgtggtatatggagccgattgtgacagggacagacccaagatccgtcatgatagagtttgaagcggaaaaagagcgtataagctatgtcattaaggaaaaaggagcggacggcactctcttttcgcaaggagaagtgatttgtaaagaaaatggagcgtcgtttgaggccccggtctttcagcttccggcgccatttacgcagagaacggagccgaaagacatctatcactcgttctctgaggcgggaatcgtgcaaaaggacagttttcaggtcatccgcgaattctcttatacagaaaggaaagcactggccaaattaacgctcccgtcacacttggaagcggattttaaacagtacatcctgcatccgtccttactggatggcgctgttcaaactgcaatggcgcatgtgctgcaatttcaaaaagagcctgcgcttatcgtaccgttttccttcggagaaatacagctgcttaaaccgttagcgaaaaccgtatttgtgcatgcggaggtaaaagcggcctccgttcaccaatttgatctgcatatttgtgatgagcgcggtgtgctgctggcggcagtgaaagattttatcataaaagaggtgcaggaaagcgccgggtttaaccaaaaagccggcgtcatgccgaagaaaagccgtgaaacggaattgcttatgacaccggtttggaacaccgtcaccattccggaaaccggcatgtctttcatgcgtgaagaaaaaataatcgtcatcgggggcgggccggattttcagcaggctttgaaagagatgtattccgatgtccgttttccggacatcacttctttggacagcgcggaacaaatagctgaaacactgaaagcgcaaggctcttttcaacacatgatatgggcggcgccggatcatccgattccatccgtttatgatgcggatacggccgacggacaggagcacggggtcatgcagcttttccggctggtaaaatcgcttctgcttctgaattttgacacggaacaactatcattgacaatctgcacgtttcaagcacagccgattcatgaacatgatgaggtcaatccgagtcatgcaagcatacacggattagcgggggcgctcgcaaaagaatacagcaattggagcatccggcttcttgatttggaatctcaaaggggagaccggcatcttcccgatatcttctctttaccggcggaccccgagggaaatccgtgggtctttcgtgcaggtcagtggcaccgccagcaattggccgtctgccagcctcatgcaggtgagccttcattataccggcacggcggggtttatgtgattatcggcggagcaggcggaataggagaagtatggactgaatatatgattcagacctatcaggcgaaaattgtctggatcgggagacggaaaaaagatacacagattgaaagaaagctgaaaagacttgcggctttaggtcccgcaccgcaatatttcagcgcggatgctgcggattatgattctctcaagcgggcgtatgacaccattgtgaaggaacatggaaaggtgcgcggaatcattcattccgccatcgtgttatcagaccggagttttgccaatatggaagaggaccagttccgcgcttcactttctgcaaaaactgatgtcagcttgcagattgcccgggtagctgaaggggaaccgctggatttcttgctgtttttctcttcgatgatgtcgtttcaaaaagcgccgggacagagcaattatgccgccgggtgcacgtttaaagacgcttttgctaagcggatctcacaaaaagcgccgtatgccgtaaaggttgtcaattggggcttttggggaagtgtcggcgttgtcgcttcagaacaataccggaaacggatggagcgggacggaatcgcttctattgaggcgcccgaagcgatgaaaacgctggaaaccctgctttcgggaccttatgaccagctggcgctgatcaaaacgacagatccggtttttatgaaagatgatctgaaagaacaagtaacggtttatccggaaaagattccttccgcactcggacaattagcggttaacatcacgcagaatgacgaagctgagcgggtaaaagcatcaaatgtcatgagctgcatgagagagatggaatccctcattgaaaaaatacttgtatcaaccctttatgagatgggcgcaaggcttgatgagactttgccgttatttcaatcggctgccggcataacggaacaatacagcagatggctgaaagagagctttgtcttcctgactgaattagcgcttgctccggaaaaaacggatctaggggaggtgtgggaggaatgggagcggaaaaaagagacttggctgcgccggaaagacatgagggcgcatgtcagattggcagaagagacattgcgtgtgcttccagacattttaaccggtaagcttccggcaacggaagtgatgttccctgactcctccttccgtcttgtggaaggcatttaccgcaataatatcatttctgattttttcaatgacaagcttgctgacacattgattgcagttttgcgggagcgtctggaaaaagacccgcaggcgaaaatccgcattttagaaatcggagccggaacgggcgggacgagcgccgcggtcatgagaaaattgaaaccgtatgaagcgcatattgccgaatattgtttcacagatatttctaaagtatttcttttacatgcagaagacatattcggtccggaatatccttatgtcacttataaaatattcaacgctgagcagccggtatcaacagaagcgccggacatcggcacgtatgacgcagtgatcgcgaccaatgtgcttcatgcgacaaaaaatatccgctctacgctgcgccatgcgaaagcaatgctgcaaaaaaacggccagctgtttataaatgagatcaacagccgcaccgtattcaaccatgtgacgttcggccttcttgaaggctggtggctgtatgaggatcatgatttacggattccgggctgtccgggggttgagccggccggctggtcggaagcgctttcacttgaagggttcgtccatcctctgtttccggctgaagccgcacacgacttaggccagcagattatagcggctgaaagtgacggaacggtcaggcttgccctcccgcaggcgtcagaagaaaaaccggagcgccgtccgtatgacgcagatggtctttcggatgatacattgcatttcagcttgagagaaaaaagcgttgaactgatgaagaaggtaatcggtgaagcgcttaaagtgccggcgcatcgtcttttatcccatgaacctttaaccgcatacggattggattccatactggtcgtcagactgaccaacgcgttaaaagacgtcttcggttctgtcagcagcactttgttttttgaatatcaaaccattgatgagcttgctgattactttctgtcttcccgtaaagaagcgctcgagcggcaattcgggaatggacgggctcattccgaaaacgccggacggatgcaggctcccgcagaaagcgccgcgccgattccaaacgtaagggaacggggcatcacatatctgacggaattaataggaaaaacgctaaagattccgagcaggagaatggatccgtcggtttccttaaccgcatacggtttggattctattctggtcgtcaggctcacaaatgcttttcgtaacgtgtttgaccaaatgaccagcaccctcttttttgaatatcagacgatagaagaaatcgcggattacctgcttctttctcagcggagagcatttatgaaagcgatgggtgtgcgtgaggagcagctgtctgatcacacagataacctgaatgtaattcctcaaaacgaggaagaaagcaggacaaacggagatccctatatccaggatatcgctgtcatcggtctgtcaggccggtatccgggcgccgatcacgttgatgagctgtgggaaaatgtaaaagccggcaggcattctattacagaagtgccgaaagatcgctgggactggaaaacgttttataacgaggaacgcggaaaatgggggtccatttattcaaaatggggcggtttcctcgatgacattgataaatttgatccgctgtttttccgtatatctcccgcggaagctgaaaggatggatccgcaggaaaggttgtttctgcagactgcttattcaagcattgaagatgcggggtacaccccggccacgctttgtgacagccggaaaatcggagtctttgtcggtgtgatgaacagcaattacccgacagttcccagcgactggtctatcgcaaacagagtatcgtttttgttcaattttcaagggccgagtatggctgtggatacagcctgttcttcttctttaacagctgtccatctcgctgcagaaagcctgcggagcggaatgagtgaaacagcgattgccggcggagtcaatcttatcgttgatccggctcactatgagcggctgtccgctttttcaatgctgtctcccggtgataaatgcaaatctttcggagacagggcggacggttttgttgacggtgaaggagtaggggcgattgtgttaaagccgcttgctcaagcggagaaagacggcgatcatatttacggcgttatcaaaggaagcatgctgaacgcagcaggcaggacaaacgcttatatggtgccgaatccgaaagcgcagtttgatctgatcgcagagacgttgaaacggacagacattcacccgagaacggtcagttacttggaagcccacggaacgggcactgcgctcggtgatccgattgaaatcgacgggttaacgaaagcttttcgcctgacaacagaagaccggcagttttgttccatcggttcaattaaatcaaatatcggacatttagaaagcgctgccgggattgcgggaatcaccaaactgcttctccaattgaaacataagaggattgccccttcattgcatgcggcggaattgaatccgaatattgagtttgagcacactccgtttttcgtacagcaaaaagaaacggaatggaaacgacctgtcttgaatatcacgggtgaaatgaaggaatatccgagaattgccggtatttcctcttttggagcaggaggggcaaacgcgcatatcatcattcaggaatatgtgccgtctgacagcctgaaaccaagggaaaacgcgtctgtttctccgcaaaaaccggctgttattattttatcagcgcgaaatgagcagcaattgacagagcgcgcccgccagcttctggatgatgtcataagaaaaaaacgttctgacggggatttggccaaaatcgcttacacgcttcaggcgggaagagaaccgatggctgagcggcttgcatttacggccgagtcgatagaagaactgaaaatgaagcttatgagtttctcaaacgatcatatcgaacatgctcatatctggcggggcaggacagccaaacatcattcattggcggcttcgctcacttctgatgaagatatggcgcttaccataaatgcctggctgaaaaaagggaaatacggaaagctgcttgacctttgggttaaaggacttgacgtcgattggtcagctctttatcagcgcaacccgggccgcatcagtctcccggcttatccttttgccaaagaccgatattgggtcacaaaagctgatgtgtcacttgacaaaacaggctcagcggaaagtgagaaagcagccagacttcacccgctgctccacgcgaatacatcgacctttaccgcccagcgctttacttctgttttttcagggcgtgaaccgttttttgccgatcacatcgtcaatggaaaaccggtgcttccgggcgcggctgctttagaaatggcccgggccgccgttacacttgccgctgagggcttgccgggcgggaaagcgggtgtccggctcaaacagatcgtttggctccgtccggtgacggcgctttctgaaggcgtgacgcttcatgtaaagcttcagccggaagaaaacggagacatcgcttttgaagcgtatgccgaaggagaagagccgcttgtctttttccagggaaaggccgtgctcgaagagacggagcgtgctccggtactcgatgtggaggcggttcaggcgcgctgcggcggccggcgcatgtcaaaggctgagtgctatgaagcattcgacagtctcggcatcacctacggaccgtctcatcaggcgcttgacgccgtctatgccggaagcggagaagtgctcgcgaagctcactcttccgccgtacgcccgcgaagaaaaggagccgttcatcctgcatccgagcatgctggacgccgccctccaggcttctatcggtctcgtgcactcagacggttccgcgtccggacggccgtttctgccgtttgccctccaagatatgcaggtgttttctgcgtgccgggagacgatgtgggcggtgctttcctcagcggacggcgcctatcatattgagctgtgtgatgaaaacggcgaggtatgtgtccgattgacggggctcaccgcccgttttctggaagaggaaacggagggaaaaccgctcttgcttcagccaaagtggcaggaatcaccgccgggtgaaggcggcggacaagcagagtctttcagatacgtgacgctgtatggcggaatgaacgctgaggacataaacggcgccgtatgtgcggctgacggggaaggtccgattgaagaccgttatgacgcctgcgcggcggagctgtcagcgatcgtcaagcgtcttatcaaagaaaaacagaagggaaaaacgctgatccagcttcttgtccccgacaggggggaagacaatgtattggcggggctggccgctttcctgaaaacggctcaccttgaacatccgaagctgtacggccaagtcatccaagccgatccggacgagccagcatcatcgcttcttgccaagctgaaagaaaaccggacgcaccctgaacaagcggaaatccgttatcaagccggcaaacgtctcgtcagaaactggcgtcacctgcctgcgcttcaaagcggcgccgttccgtggaaagacgaaggggtttacctcctcaccgggggagcgggcggcatcgggctgattttcgctgaagaaatagcctcccgcgtcaaaaacgccgtcctcatattaacgggaagggcggaagcgcttgataaagaccgctccgcccgcttacggcgcttggaagcgtcgggtgcccgcgtattgtatcaaccggttgatgtgacagacagggcggcggtcatcgccctcgtccgcggcatacaggaggagcacggaacactcgacgggatcattcacggcgccggcgtgatcgccgacaattacattctgaaccagacagaaaacgaacggaagaccgtcatggcgccgaaggtgaaagggcttatcaatcttgatgaagcagcgaaagatgcgcggctggactttttcattctgttttcttccttggcgggaggtatgggaaacccggggcaggccggttatgcggcagccaacgcatttatggacgtatatgcagcccgccgaaatcgtctcgtgcgggacaacaagcggagcgggcagaccctgtccgtcaactggccgctttgggaagaaggcggtatgcgcgtggacaaagagacagaacggctgatgtatgaacagaccggaatgaaagccatgcgatcggcttcaggcatccaggcgctgtacgccgcttttgcctccggagcacaccaggtcatggtggcagaaggcgacgagaaacggattcgaaaaaacctgatgcctgaagcgccggaaccgtcacgcagcattcatgtgtcaaggaagacccacgtccatctgccaaataaagtacaagcggaactcaaacatatgatatcaggcattctgaaggtgaaagaagaagaaatagatgctgaatcagagatgagagattatggatttgattcggtttcattcacgcagtttgcaaatgaactaaataaaatgtatgggcttgaactgacgccggccgtgttttttgaatacccgacagtctttagttttgcccaatacttgctgacggaacatccggatacattcggcccacaggaagaaacagaaacggagaaaccggttgagcgtaaaaaaatgaagacggagccattctcgattccgtcccgccttcctaaaacaaaaaccgcagctgaacctgaagagcccgtggcgataatcggaatcagctgtgcatttccaatggctgaaaatccggaaatgttttgggagaatttagccggagaaaaggactgtatttctgaaataccgccggagcgctgggactggagacagtattacggagatccgcagaaagataaaaatgcgagcaatgtaaagtggggcggcttcattgatgaaaccgctcaatttgatcctttatttttcggtatttctccgcatgaagccgaaatgatggatcctcagcaaagacttttaatgatgcatgtatggaaagcgattgaagatgccggctgctctgcaaaaagcctgtcaggtacaaatacaggcatttttgcaggcacgacaaacagcggttacgctcaggaagcttcaaagttccatatagagattgagggttcttccgctgccggaacggttccgtcaatcggtccgaaccgcatgagctattttctgaatatacatgggccgagcgaaccgattgaaaccgcctgttcaagctcattggtcgctgttcaccgtgcggtcagggcaattcaggccggagactgcggcatcgcgattgcaggaggcgtcaatgctattgtgtcgccggacatgcatatcagctttaataaagcaggaatgctcagtgaagacgggcgctgcaaaacattttccgatcaagcggacggctatgtcagagctgaaggtgccggcatgattgttttgaaaacattatctgatgcggaacgtgacggcgaccgtatttatgccgttatccgcggaacggcggaaaatcatggcggaagggcggcttcccttacatcgccgaatccgaaagcgcagacagaagtcatgataaaagcgtatcagcaagcgaacatcgacccccgtacagtgagttatattgaagcccacggcacgggaacggcgctcggagatccgatagaaatcaacggactcaaagcggcttttgcagcgctttatcaaaaagccggagtaacggcacccgatcagcctcattgcggcctcggttccgtcaaaacgaatatcggccacacagagcttgccgccggcatggccggacttttaaaaattattttgcagatgcagcacaaaacgctcgttaaaagtctgcattgtgaaaccgttaatccgtatatcagcctcgacggcagcccgttttatttcgtccgcgaaactcagccgtggaaagcggcgactgatgatagcggaaatgaactgccgcggagagcgggtgtcagctcgttcggatttggcggtgtcaatgctcatgtcgtgctcgaagaatatgtttctcctgttgaagagaaacaatggacggccggtgaacttcagccgtccttattcattctctcggcaaagacggcggaacagctgaaggaacgtgcggaacagctgcgcagatatttggaaaagtcacattcagctgacggagctcttgcggatatcgcttatacgcttcagcttggccgggatgaaatggaagagcgccttgccgtcattgctgaaacaaaagaagagcttacgaacgcgctgaatgatttcctcagcggcaaggagacggggcagaatttctttacaggccggaacaaagcgatgaaacagctgtttacagagatgacggacaatgcagaaatgagcggggccgtagatcaatggtttgaagcaggaaagtatgcaatgcttgcaaaattatgggtgcaaggcttgcatgttgattggagtaaattgtatcaggacgaaagaccgaaaaaagtcagcctgcctgtctatccttttgcgaaaacacattgctggataccgcacagtgcgcagcatataaggcaccgggagacttacgggactgatacgtccccgcttgagacttatgagcgcctgcttgatgaattggagaaaaacgaaataagcatagaagccgctgtaaaaagaacgatcggtttttacagggattagcgtaatggaggaaaccatatgaaagagtttctgcaccgggttttttctgacgtcaaaaataaaaaaatgacaaaacaggatgcgatcggcattttgcgcgattatgatatgcggatgggacttcgccaaacggattcccttcatccgcttgctcagcagcatatttccgatgaaacgggacagggattctcggcagctttcagcggccgggaattttttctcgctgatgtttctttacagcataaaaagcttatgcctggagaacttcttttggaaatggcgagagctgcggctgttttgacagtaaaggagactgcggctgtccggctgacgcatatcgtgtggtcaaagcccattctgactgaggctgagccgttccatatcgaaatcaggctgatacccgcagagggtgaagccaaaaggtttgagatttataatccattttctgctgattccagtcattatgatgtgtacagccaagggacgattcagccagttgatgctgcgcccggcatgctggatatcagccgcttgaaggaaaacagcggttccctgatggataagcagcaaattgaagccatcactcagaacgataccgttcaatacagtgagcacatgaaaggaattgagcgtatttacgcttcatcaggacggatgctggcagacatatcaattccattgacaaaccaaaaagaatccgcccgattcggcctccctccctgtgtgatgcaaagtgtgacagaggcatgcgcgctgcttggcggcaaagaatataaaacgctcgctccggtttcattggacgagcttttgttttatgaatcttgtcctgacaaggtatgggccgagatacaagagaaggcggggagcttttatattgatttatgtgacggagaaggaaaaatatgggcttctctgtcggggttgaagctgcagcctgtcatcaagacgggcgcttccggaaaaaccaatgccgaacaccgcagtgaacgtttgtatgaacaaacgcttcttcagctcaaaacgctttttggcctgactgcaaaaattgctgtttccaacatagatactgaagagccgctggaaacttacggaatcgactccgtcactgtgacgaaattgaaccgcgaattgtctctgcttttcggtgacctttccaaaacggttttttacgaatataagacactgggctccctggcagctcactttgtcacggattatccgaatgaatgccgaaaatggacaaatgatgatgagcaccgttcaggcatatcagaacaggttttggcaaatgaagattttccggtgcttccgtcgtttatcaagcgaagaaaacggcctgctttttccaatgagaaacagacaaaagaagggattgcgattatcggagtcagcggacgttatccgcaagctgaaacacttgaagagtactgggataacttagcggccggaaaagactgtgtgaccgaaattcccgaagagcgctgggaaaaggacaggtactacaaccctgatcccgaagcggccgtgaaagcagggaaaagttacagtaagcggggcgggtttctgaaagatgccgctttctttgatccgctgttttttcaaatttcaccccgtgatgctttgaatatggacccgcaggagcgtctctttattgaaatgtgctggcaggtgctggaggatgccggttatacgaaggaacagcttgagaatctgtataacggccgggtcggcgtttttgccggcattacgaaaaacgggtacggaatgtactggaaaaacggcggcaccctgcagccgaaaacgtcgttcagttcagcggccaacagagtttcctattttcttaatctgaaagggccgagcatgccggtcgacacgatgtgctcgtcttcgctgactgcaattcatgaagcgtgtgaaaacatccttcgcggcgcatgtgacatggcgattgccggcggtgtgaatgtgtatacgcatccttcggcttatgcggagctcagcgcctatcgaatgctttcaaaagacggaacgtgcaaaagtttcggtgaaggcggggacggatttgttcccggggaaggcgtcgggaccgtgctgttaaagccgctgtcaaaagcgatggctgataaggaccatatttacggggtgattcgcggcactcatatcaatcacggcggcagaacaaacgggtatacagtgccgagtccgagcgcccaggctgacgtgatttccggcgcgcttgaaaaatcaggaatacatccgcggatgatcagctgtatcgaagcccacggcacgggcactgaactcggagatccgatcgaaattgacggtttgacccgcgcatttcaaacgaaaacgtcagataaaggcttttgcgccatcagctcagttaaatccaatatcgggcatttggaagccgcggcaggcattgccggtgtaacaaaactgctgctccagtttcaaaaacgaaagctggccccttcattacattgccgaagcttgaatccgaatattgcatttgaccggacgccgtttgcggtgcagcgtgaattggcagactggaaacggccggtcattgaggaaaacggagcgcagaaagagattccgagaatcgcgggaatctcttcttttggcgcgggcggggcaaatgcccacatattgatagaagaatatattgaacctgatagggagatttctgagccattcacagatgaagatcccgcagtcattttattatccgccaaacaggaggccagcctgaagcagcgggcgcagcagcttcttcaagcgatcagaaaaaatgacgtcacagaccgcagcctccgggatgcggcttacacccttcaaaccggaagagaagcgatggaagaacgtgcggcgtttatcgtgacgtcgacagagcagttagcggaaaaactgcagtgttttattgacggcggaacagacggctgcttcaggggaaaaagcaaacagtataaagatattctagccgtttttaaggatgaagatatgcaggaagccgtccgtaaatggatgaaaagaaaaaaattcgcgaagcttctggaactttgggtaaaagggctgaagattgattggtcagagctttataacggcagcctgccgcatcgcgtcagccttcccggttatccatttataaaggatcgttattggccggacgatgcagcgccggacaatgttcgcggtgctgaaacacattctgaaacatttcgtgaattccgctttttacagaaaagctgggcagaaagcagccgtgttccggctaaggaagtgcggggcgtcatcggaatagccgctgatcaccagacaggaaatttggccgttgagctgtcccgttatttccccgagtctgaaatcattgacgctgcatcaccggaaatatccggggacgcggcccggtttggcggtctgattgatgtgacgggatgcgggacggaaatcaagcatgatgacggctggattcatcgtctgcagtctctcatcgacaacagaaaccgcggccgaaagctacagctgctttgtgtgacaaaggggcttgaaccttttgcgaatgaaacgataaatctctcaggtgcaaaaaaggccggattgtaccggatgctccaaagtgagtataaggatatccgctcgcggcatatggatgcagaacggactgccgaagattccgagctggcaaaccagatcgcagaggagttttttcgcgattctgcagacatcgaagtgtgttaccgaaacggtgtgcgctatcacgcgcggttaaaggaaacaaacagcttagctgaaaaagaattttcatttccgaaagaccatgcgctctggatcaccggagggacccggggactcggatatttattcgcccggcattttgccgaacgttacggagtcacgaaactcgtgcttaccggaaaagaaacaatgcctccgaaagcggagtgggatgatcatatcaaacggaattccccgttttccgataaagtgagaagaatcagagagctcgaacaaaaaggtgtccgaacggaagtgctgtctgtatcttccggccctgaatatgagcaggccgtcagccgggtgaaagagaagatgggaccgattggaggcgtgatacacgcagcgggagccgtagatctcgatcatcccgcctttatccgcaaaacaagagaacagatgatgactgtgcttgaacctaaaactgacggactggaccttttgtatcaagcgctgcacaaggagcctctccggttttttgcgctgttttcttcagtgtccggcgtgatgccggaattaggagcgggacaaagcgattatgccatggctaacgcctatatggattattttgcggccgcaaaaggttttccggtgctgagcatccaatggccgagctggaaagaaacgggtatgggcgaatcaaaaagccgggcctatcagaaaagcggtttaaagagcatcactgacagagatgggctgagcctgtttgatgccgttatggcaggcgattgcggatctgttattatgccggccgtcattcacccggaaaaatgggagcccgaccgtctgatgctttcaaccggccttaccgaaacaaagcagcatgtacagggtgagacagaaagcgtagaggagtggctgacgggcatttgctgccgggaattaagactggagccgtcaagatttgaatctgatacaccgtttcaagattacggagccgattctatcatgcttgcccaagtgtccagagcgatcggaaagaggatcaaagctgaccttgacccggcggtgctgtatgaataccctacggttgctgcgctggcgggatggcttgaaacggcatatccggaaatcaaagctgccgtttcaaaaccggttcagcctgtaatcccggacgttcccaaacaaacagcagccgctgtcattcagccttctggcgctgcagcggcgcaagacatcgctgttgtcggaatgtcctgccgttttcctggagctgaatcaattgaagcttattggaagctgctgtctgaagggtcgtcggctattcaaagggtgccgaaagaacgctggaaaacggagaaggcggattatgcgggccttttaaaaaatgtaacgcattttgacccggagtttttccttattcccgaagaagacatcaaggcaatggatatccagtcctttcttatattagaagaggcgcttcatctgttcagagacagcggttactctttacaagaaatgaaaggcaggtcagccggtgtctatttaggaggacgcggcggcagtatgcctgacgaaaaccgtctgaagcatgcaaaaaatccgatagtcgccgccggcccgaattacttggcggccaatctttctcagttctttgatttgaaggggccgagtctcgttttggatacggcctgttcttcagcgcttgtcggtatgaatatggcgatacaggcgctttcttgcggtgaaatcgactcagcggtggtcgggggagtcagtctgctggaatccggtcaaacccaccggatgttcgaacttcgcaatctgttaagcgaagagcctgcgtttcatatttttgaccgccgcaccggaggcatcgtattgggagaaggcgtcggaatggtgtatttaaaaacagcggcccaggctgtaaaagacggggaccggattcatgcggtcattaaaggcatttccgtaaacaatgacggcagaaccgcggggcctgccacaccgaatatacaggcgcagaaagaagtgatggccaaggcgcttgccaaaagcggcagaaaagcggaggatatcagctacattgaagcaaacggttcaggctctgaagtaaccgaccttttggaactgagggcgattgaagcggtgtaccgtatgcaaaacagcgcgccttgcgaattggggtcgatgaagccgaatatcggacacccgttatgcgctgaagggattgccggattcattaaaacagtgcttatgctctcgcgccgaatgcgtgtgcctttcctttcgggcaaagagccgatgacgcattacgatctgtccgcctcgccgttttatttttcgcacgttctgcgtgaatggacggattcaccgcggattgccgccgtcagcagtttcgctgacggagggacgaatgcccatgtcatagtggaagcctgggagcaggaggcgtataccccggttagaaagcctttgccgagacaggaattaaaacgccggcccatccgtccggacaaagctgaaaacctgcatgaaaacgcacatgaatcccgcccgaatacgttttggaaacaaatgaagacttactgattgcgctgaaaattgaacgtcgatatggaggaagttcatatgcaagagcagcttcttattaacaatcagcatcccgttctgaaacatcataaagcctatggaaaggaactgctgccgggtctggcttatattgacctgatctatcagactttcagagaaaacggtttttttcatgccggccttgaactcaggcacttatcgatttttcaccctttagctcctgaacagggagaaacaatcctgctttccgttgactgtacagagaacggcgaagggcagtggaaggtagaggtgaaagggcaaaaacaaggtgacgaagcagcagagacaaagatatatgccgcggcgcaaatgcattccgtcaagcccgccggcttccaagagagcgtccggatggatgccgtaaaacaaacggcggcagaaataccgcttgaggatatttacgcggaatgcagggatcaagaactggttcattcaggaatgatgaaaggctgcggaagcgtctaccagactgaaaaagagatttatattgatctgtcggtgcaaaaggatcagctggaacatgcagaagaggcgatgtttcatcccgcattgatagatgcgagcagcatcggctccaatgtatatctcgctcctttgacgagggaggaggggcaattatttctgccgctgttttatgaatcattttattgcgccgaattgctgcagacgacatgtatcaccaagataaaaaaagaatccgtcacacgtaagaaagatctcgtttacgtgacaatggagtttttcaatgaggaaggcagaaaagtcggcgaactgaaaaacttcgccaataaacgggtgagggacccggaactgatcaatcagaaacggcaaaagaaagaacctgacgggcggaatgccgtcccggctccgcaagcggaaccggcgccttccgagccccgccgtgcggaggcttccgccggccttactgaacagtgcatcctttatttaaaagaattgcttgccgcccgattgaacaaacctgtgaaagagattgacccggatatcggctactatgaaatggggctggattctccggggctgttggacatggtaaaggaaattgaacgaaaaatcggaacgcagcttctgccgacgctgttatttgaatacacgacaatcgcggaattggcgggatatttgcgcgaacattacggagccggcttcggccatgctcaaagcgggcatccaaatgctgaacctttgcgccgggaaaaaaagaggacgacccaaaaccgcgtgaaaaaatcggcgtcagccggaacgcagaatggagatattgcgatcgtcgggatggcgggacggtaccccggcgccaaaaatcttcgtgaattctgggcaaatttaaaaaatggagaaaacagcgtaacggaagtgcctcgttcccgctgggatacgaggaaatatgagcatttgcgatcgccgtccggcaagccgatttccaaatggggcggttttatagacgatccggattgttttgatgcgaaatttttccggatttctccgcgggaggcagaagctaaagatccgcaagaacgattgtttttagaaacatgctgggaaacgattgaggatgcaggctataccccggaaacaatcgttcagccgaaagggccgaataagagaatgaacgtcggtgtgtttgccggggtgatgcatatggattattctctcgccggcgctgaagctgcggccaaagggctggtctttccttatcccttgaactatgcgccgatcgcaaaccgggtttcatatttctgcaattttcacgggccgagcatggcggttgacacggtgtgttcgtcatctctgacggccgtccatatggcggcggaaagtctgagacgcggtgaatgtgaagcagctcttgccggaggcgtcaatttatcattgcacccgacaaaatatatcacatacggcttgatggatatgcattcgagtgacgggctgtgccgcacgttcggcgaaggcggcacaggctatgtctcagctgacggcatcggggccgtgctgctgaagccgcttcacaaagccgaagaagataaggatcatatttatgcggtgataaaaggcagcgccgtcaatcacgtgggaaccgtcagcgggattaccgtgccgagcccagtggcgcagggggatatgatagctgaatgtcttgaaaagacggggatcgatcccaggacgatttcttatgtggaagcgcatggaaccggaacttctttaggagatccgattgaaatacaaggtcttgttaaagcttaccgcacgtttacggaggatcggcaattttgtgcgatcggttccgttaaatcgaatatcggacatgcggagtcagccgccggaatcagcgggcttcataaaacggttttgcagctgtttcacaaaacgcttgtcccttctttgcactcagagacgattaatccgtatctccgtttagaggactcgccattttacgtgcagcaaaaaaccgagtcatggaaaaagccggcgtatacagagaacggcagagaacattcctgtccgagacgcgcaggcatcagttcattcggggcgacgggttcaaacgttcatctcattttagaagagtacaggcccaaaaaccccggcattacggagaatcaagagagaccgtatatcgtgcctctatcagcgaaaaatccggagcggctgaaggaatacgctgcccgcctgctgatgtttctcaaagataaagcgcttgaaggaagcgggtcgctttatgacaaaacagatacaatgcaaaatcagctggaaaatgcgctgcgcggtgctctggcggaagttctgcatgtagaggccggctcggtagatggtgaacaggattggaaggaattcggcttggatgtcatgcagctgacacagttttctgagcggctgacggatcaatacgggctggcaatagacatgactgatctcatacagcatacttccgtccggactttagcagaatgtctgacaaacgatgagaaacataagaatattctttccggtcttttcggtcagtccggcttagagaagcagtctgatgaacctttttccctgcggtcactggcgtatacgctgcaaacgggacggctggcaatggaagaacggcttgtttttttagtgaacgatcaagcggacctgatcaggaaattaaccgaatttacagaacgaaaacggcagattgacggctgctttcaaggccggtctgatagcggaacggaaatcaggggtttcctgaatgatgatcaggatacggaggagctgatccgaaaatggacggacagcggcacttacaaaaaacttgcggagctgtggtcaaaaggatttgagatagactggacgcggctgtatcgggaggagaaaccgcgcaggatgagtctgccgacatatccgtttgcgaaggagcgctattggataccggagcccgatcatcccgtcacttccgtaaatacagaaagcaggcttcacccgctgcttcaccgcaatacatcagatttgttagaacaaaaattcagcacggtactgaacggagatgaattcttcttagccgatcatatcgtccgaaacaagcgtgttctccccggggcggcttatcttgaaatggcgagagccgcggctgaactggctgccgcgccgttagccgctgaatacacggctaaaaccggcatttcgctgcggtatatcagctggatacgccaggccgttcataaaaaagagccgctgcgtatgacgacaggtctttccttagaggataacggcaatatttcatttcaagtgtacagcaatgaaaacgattcagacatttattgtgaaggcagtgctgtgattgagccgctgtctgaggcggcggttttgcatattgaacagctgaaagcgcgctgccgcaaaaaagtgctgtcaaaagaagactgctatgcggcatttgcaaaggcggaaattgtatacggaccttcacatcaaggaattgatcacatttattgcggggaaaaagaagccttggctaaattggtgctccctgcttccgtttgtgatgaggccgaacagtttgtgctccatccgagtctgattgattccgcttttcaggcggccatcggcgttatgaatgaagataaagcgggttatccggagcagccgttaatgccttttgaattgcatgaactgaccgtttttcatccgtgcagtccaaacatgtgggcggccgtatttgtgacgcatgaaacacgggccgtgcgaagaatggacattgatatatgtgatgaacgcggcaatgtgtgtgtaagaataaaaggattttctgcccggatggccgaaagtgcgccggccgtaaccgataataagcaatacgatctgccgggtaaccttaccggagccgtcaaactgatgcaggtatgggacgcggaaccgatagacaaccaaaccggcttccccatttctgaagcaaaagctgtcatcataggcggtacagacgggcaggcggacgcggttttacgattgtttcctaaagctgtgcgatttgatagcagccaaagtgcttccgttgaagtgatatccgatcggctccgccgtgtcggtgagattcagcatatgatctggtttgcccctcagccggctgattcttacatccatgatcaaaaaagcggggtgctgcaaattttcagagcggccaaagctcttatcggtctcgggtatggaaaagagcagctcgggatgacggtgattacgcaccaagcacagcctatcacccaatatgatgaggtgcgtcccgctcattccagtgtgcacggtttcgtcgggtctctcgcaaaagaacatccgagctggcacatccgtctggtcgatcttgaagacgggggggatttccctgcagaagacatattcagcctgccccgcgaccgtacgggtaaagcatgggtgcgcagacatcaggaatggcaccggcctcaattgcttccggtccaaagcgggccgtctgaaagtgttccttaccgatatggaggcgtatatgtcatcatcggcggtgcgggaggcatcggcgaggtttggacagattatatggtgacggcgtataaagcccgagtcgtctggatcgggaggcggccgctggacagccggatacgccaaaaaatagaccggtaccggccatcaggcccggctcccgaatatatagcagcagatgcttctgatcttccatcgcttcagcgcgcctatgaacagattaaaaacacatacggcaccatcagcggcgtcgttcattcagcgatggtatttgcgaatgaaagcgtaaaagatatggaagaatcacagtttcacgccggccttgcggcgaaagtggatatttccgtcaacattgccgaagtatttgcgaaagagtctttggactttattctctttttctcttcggttatttcatatattaagaatccgaatcaaagtcattatgcggcggggtgcgcatttaaagacgcatttgcccatgagctttccgggcggctgtcatgcccggtcaaagtgatgaactgggggtattgggagcgggctgacaatcacatttctgaagagtttgacagactgagtgcaatcggtctcggactgatcagccgggcggaagggatgcaggcgctggaaactctgctgacgcagccgatctcccgcatggggctgatgaagctgaccaagccgattccgatcgagggaatgaaccctcatgaatttgtgactatctgattgcctgtcaaaatgacggagcaaatttaattttcttaggaggataaggttttgggtaagggagacaaacaaaaagaccgtacacagttatccttaagaacagaaataagcaatcaaatgaaagaattgaatcagcttttgctgcaagtgctgcgggtgacgctgcgttcaatgggtctgaccggcgaagcgccggcggcttcctgtctgcctttatatgagcgctggctggaagaaagcatccgtcttttagacagcgatcttaaaagcggtgaaacggccgcgatttgggaagagtggcataagaagaaaaacgaatggctgaaagatccggatatgaaagcgcaggctctgctggcggataccgtcattcaagctttgcctgacattttaacaggcaaaataaaagccactgacgtgatgtttcccgattcttcaatggagctcgttgaaggaatctataagcataacattctcgctgattattacaacgatgtgatggcaaatgaagcgtgtatttatgtggaaaatgtaattaaaaacaatcctgaggcaaacatccgtctgctggagatcggagcgggcaccggcggaacgagcagcacactgtttaaaaagctccgcccctatcaaaaccatattcaggaatactgttataccgacttgtcaaaagcttttttaatgcatgccgaaaaggaatacggcgcggacaatccgtatttgacgtatcagctgtttaatgtggagaagcctgcggcgggccagggattacatctgagaacctacgatatcgctatcgccgcaaacgtgctgcatgccaccaaaaatatccggaaaaccttacggacggcaaaagccgtattgaaaaaagacggtttgctgctcgttaatgaactgggcggacatacgccgtttacacatgttacattcggcttattagagggctggtggctgtacgaagacgaggcgctgcggattccggggtgccccggtctttatccggaaacatggaaatcggttttaatggctgaaggctttcattccattcaatttccggctgaaaacgaacgtctgcacacccagcagattatcacggcgaaaagcaacggagtcatcaggcagagcagggaagcttacaccgcgcaaaagcgccaatcaaacgtaccgcgaacattctctgatcgtcagctccccatcaaacaagcgggagaagggctttcggaaaagacagctgcttttctgataagggctgcggcaaaagtattaaaaatgccggcagaagagataaatccgctggctcctctggatgaatacggtattgactctattctgatcgttcagctgacgaacgagctgcgggatctcgtccctgatatcagcagcacgctgttttttgaacaccgaacgatagaagagcttgccgcatacttggctgaaacgaaggagcgcgaactgcttgcgcgattttctgaagaagtccgtcatactgaagcggtatcatcaggctctttgcttgaaaaaagcacagagtatctgaaacagatcgtcagcgtcatcttaaagatgccgattgaggacgttcaagcccatacgccccttgaagaatacggaattgattccatcttaatcgtacagctgaccaaccgcgtgcgggaagacgtccctgatatcagcagcacattgttcttcgagtatccgacaatcggcggattagcggaatatctcgtcagctcaagacaggaagatatggctgggattttcaagacaaataaagaagccgaaaaggtgccgcacactctacagaaaaagcaaagccgcaaaaaaagcgccggattgacgaagcgccaagcggcatctttttctgaaaaagcgccgcccgcctccgaaccgccgtcaaaacaccttgaagtggcaattgtcggtcttgccgggaagtatcccggagctgaaaatgttaatgagttctgggaacggttaaaaaccggtgaacacggaatcaccgaaattccgaaagaccgctgggattggcgggactactatgatgagacaaaaggtaaggaaggccggatgtatacaaagtggggcggctttttaacagacattgataaatttgatccgctgttttttaaaatctccccgaaagaagcggagcgcatggacccgcaggagagactgtttctggaaaccgcttatgcggcccttgaggatgccggatatacccctgattcactatgcgccggtaaaaaggttggtgtttttgcgggtgtcatgaacggcaactatccgacaggggcccactaccactttatcccgaaccgcgtatcctatgtgtttgattttcacggtccgagcatcgcggtcgataccgcatgctcctcatccttaaccgccattcatctcgccgcagaaagcatcagaacaggtgcatctgaatgcgcgattgccggcggcgtaaacctgattacagatccggttcattatatcggactgtcttctatgagaatgctgtcgccgtcaaacgcgtgcaaagcgttcggtgataaggctgacgggtttgttgacggagagggcgtcggctgtatcgtgttaaagccgttgaagaaggctgttgaagatcatgatcatatatacggtgtcattaaaggaagcgctctgaacgccggcggcaaaacgaacgggttcaccgttccgaatccgaatgcacaaggggaagtgatcgcagacgcgatggagcgggcaggaattgacccgagagcgatcagctatctggaagcccacggcaccggcacttccttgggagatccgattgaagtcgcggggttaaccaaggctttccgccgctatacggatgcaaagcaattttgttccatcggttctgttaaatccaatatcggacacctggaaagtgcggcgggcattgctgccgtcaccaaaattcttcttcagatgaaacacggatatctggtgccgtcgctgcattcaaagcagctgaacccggaaattgattttgaaacttctccttttatcgtgcagcaggaaacggcggaatggagacggccggtcatagaatctgaaggagtaacacgggaatatccgagaatcgcgggtacatcttctttcggagcgggcggggcaaatgcccatctgctgatagaagagtatgaaccggctgaaatgacttcggcggactccggccgtccggcgctttttgttttatcggcaaaagataaagaccgcttgcgcgagcgggctctgttgctgtcggatgccgccggaaacggaacaattacagatgcaaatctgcttgacgcggcatttacccttcaagtcggcagggttcagatggaagaacggctggcgatgacagcggactctgtttctgaattggaacagaagctgactgcttttctgaataatgccgattccgtaagcggggtgtttacgggccggagtgatagtgctgtcacagagacggaaggcacagtcggtgattggatggaaaaacgtcaatttggcagtcttttgaatgcctgggtccacggggcgcccgtcgattgggcatctttatataaaggcgcgctgccgcatcgtatcagtctgccgtcttatccatttgcaaaagaaagctactggatgaagcgggaagaaccaaaaacaggaacaactgaatatgtgcatcctttcctgcatgaaaatacgtcaaccttggcggagcaaagctatcatacatcttttacaggccgggaacacgttttccaggatgtgagaggagagcgggttctgtcggcagccgtttatttagaaatggcgcttgcggcttatcatcatgcggcagacagctctgaagaaaaagagatatggatccgaacggcggcatggactgacccgattaccggcggacatcacggtgcgggcgtcaatctctcccttctgtctgaagacgaggaaggcatccattatgaaatatacagtgatgaagagaagctgcatcattatggaatcatcggtcaagggaacgtacagccatcccgcatgcttgatattgcctccttacaaaaagactgtcgcccgctgtcattcgattatgaaacaccaggcacatcaggtgtaacgatcagtaaggagttccgcaccgttgaaaagctttatacgggagaaaatgcgatttgggcgaagcttgctcttacagatgaaagcggccgtaatccgggatatcatctaccgccggaatttctggacgcagcttttcatgtcttggcaaaaacggagccgtcagtccatatcgtgcctgaaacggttgaagaactgcgcgtcatgcgtccgtgttcatccggcatgtggatgtatatgaataaaaagaatcaaaccggctgtgacattcaattttgtgacgaaaccggcattgtatgcgcagaaatcaaaggggtgagaatgagacagccgtctcagcaggatcacgggcaagaggaacactccgagatgatgatatttgaagaaaggtggacgcagcagcctctgaagaaatccattcatgaagagctgaaaacggtcatctgttttcttacgggagaagctgccagaaaacatgcttatcggtctttacaatccctttatccgggagccggcgtgttttttatttcacagggtgaggaaactcaaaagctttcaaacacgcattatcaaattaaaatcactgacggacaagcatatcaagaaacgtttcggcatattgaaacggctgcaggcaaggcggatgccgttttgtatggatggccgcttgaagatgaaaaggccgtgaaagactattccattctgtatcatgtgatccgcgcagctgcttctttgcgttctaaaccgaggcggatccttctttccgctcagtgcgggaccgaaaccgatatcagttacgccgagtcatggatcgggctggaacggtcgctgaaactgatcctgccggagacggatacggccgcggtttattttggacaaagaggaccgtttgaaaagctgatccataatgtatgtgaagagcttcacagcgggtcgttccgcagtgtcatgtacagtggggaaatccgtcacgtcatggaaatgaagcagacggatattgcccctgttgagaggcgtgtgataaaaagcggaaaaacgtacttgattaccggcggatgcggaggtttgggcttgttatttgccggatattttgctgaaaaaggaccggttacgctcattttgacggggagatcagcggcaggcggcccggtgctgcacaagataaagagattggaagaatcaggcgccaaggtgttttacgtgcaggcggatgccgcagatcaggctcagatggagaaaggtttgcaagaagcgaaagagaaaggatgcgggccgattcacggtgtcattcacgctgcaggtcttcaaggcactgaaagcattctggagaaagatctgcaaacctttcagcaagtcttatcgccaaaaacggacggcacagcggtgttagatcaggttctgtcacgggagccgcttgacttcttctgttgtttctcttcttcttcagcgattttaggagacttcggttcttgtgactacgcaatggggaaccgcttccaaatggcttttatccgccaccgggataaacttgtgagcctcggactcagaagcggcaagtcacttgcaatcaattggccgctttggaaagaaggggggatgcatgtcggcacggcggaaagcaccgatatgtatttaaaatcaagcggacagcgttatttatatacaaaggaaggactcgaagcttttgaaacattgttagtccagccgtccagccagtatctcgtcctggccggttttccgtcgagggccaaacgcttcctgcagatagatcaaggcgaacggccgatttcgggttctgtaaataggaacgtcccgttttcaggaaggcggagtgaaatgaaaggctttacactggaagaatgcgtaagctgggatgtgaaggaactggcggcggggcttttgaaaatagacaagaacagactgacggatgctgacaatctggctgatttcggctttgattctatcagtttggcggaattcgcctcttctttgtccgctcactacggaattgaagtgaccccggccctgtttttcggacattccacactggagaaggtcgtccgctattttctgacggaacacaagtccgtcatagagcatgtctatgaagaaaagaaacctgaatccgcagatcaatctgtctttgaaaaggcaggaacggaaaagcgaaagaagcagaggggaagaaataagctgaacgccggaaccgagggcagtcaggcagctgattccattgccattatcggcatgagcggccgctttcctcaggcgcgcacggcggacgagctgtgggacattctgtttcaggaaaaggacgttgtcgcaccggtcgcaaaaaaaggcttcacaagttcaaaatggaaactcggcgctgtaccgggggcggacgaattcgaccctttattttttgaaatatcgccgagggaagctgaaacgatggatccgaagcagcggctgctacttcaggaagcgtggcgggcccttgaggatgccggctacggcgccagtcacatcaggcagcagacgatcggtatgtttgtgggtgcggaagaaggagattatcaccttttaacacgggacaaaggcaatgtcacgtctcatcataacggtattttggcggcgcggctggcttatcacttgaatttatcaggtcctgtgatggcgataaatacagcatgttcttcggggctcgtttctgtccatcaggcggtattaagcctgcagaataaagagtgtacaacagctgttgcggccggggtgaatatcatgaataccccggacttttttgaaacgatagataaagccggaatgctgtcggaaaacgggaaatgcttcgcgtttgataaaagggctgacggcctggttcccggggaagcggctgcggcggttgttcttaagccgctgagagaggcggaagaagatggcgatccgatttacggggtgattcgggcgagcggcatcaattatgacgggaaaacaaacggaattaccgctcctagcggcgtcgcgcagacccggctgcttacttccgtttatgaccggggccgtatcaaccctgaagatatcgaatatatcgtcacacacggcacgggtacaaaactcggtgatccggtggaaattaacgcgctttatgacgcattttctgcctatacaaacgaagaagcattttgcgcgctcacatcaattaaaaccaatatcggccacacgtttgccgcgtcaggcattgtcagtttgatcagtcttttacaggcattctcccgtgaaatgattcccgccagtctgcattgcagcggggaaaaccgctatatcaactgggagaaaagtcctttttatgtgaataaaacggctaaagcgtggccttctctgccgggtaaaaaccgaatgggggcagtcagcgcattcgggatgagcggaacaaacgcccatgtcgttatggaaagctataagcgcagcgcttcacctcatccggatgcccctgcttatttactgactttatcagcaaaaacaaaggaggcccttcaggaaaaaatcgaagatatgatcacttgggcggaaaatggcggactgaaagaaaatgatctagcccagctcagctatacgttgctaaaaggacggcatcactttaaccatcgcgccgccatcgtggttcaagatgctgatgacgcagtgtatgtatggaagcaggcaaagcttaatgaacatcatccttatgtgttttcgggaaaagtaccgcagcactttgcaggccgacagcatattcaggagcacataatagaagtgctcggcaagtgcagcgcttcatattctgaccatagaaaatatcaggaactgttatgcgtgctggcagatttttattgtcaaggttatgaaattgaaggggacttgctttatggcggacctttgccgcgaatcggcaatctgccgggctacccgtttgccaggcagacgtattgggcgtccgatcgtcttcagggagagcttgaaagccggaattcagctgaacgtgaaaagcttcacccgctgctccatgcgaatacatcgacctttaccgcccagcgctttacttctgttttttcagggcgtgaaccgttttttgccgatcacatcgtcaatggaaaaccggtgcttccgggcgcggctgctttagaaatggcccgggccgccgttacacttgccgctgagggcttgccgggcggaaaagcgggtgtccggctcaaacagatcgtttggctccgtccggtgacggcgctttctgaaggcgtgacgcttcatgtaaaacttcagccggaagaaaacggagacatcgcttttgaagcgtatgccgaaggagaagagccgcttgtctttttccagggaaaggccgtgctcgaagagacggagcgtgctccggtactcgatgtggaggcggttcaggcgcgctgcggcggccggcacatgtcaaaggctgagtgttatgaagcattcgacagcctcggcatcacctacggaccgtctcatcaggcgcttgacgccgtctatgccggaagcggagaagtgctcgcgaagctcactcttccgccgtccgcccgcgaagaaaaggagccgttcttcctgcacccgagcatgctggacgccgcccttcaggcttctatcggtctcgtgctctcagacggttccgcgtccggacggccgtttctgccgtttgccctccgggatatgcaggtgttttctgcgtgccgggagacgatgtgggcggtgctttcctcagcggacggcgcctatcatattgagctgtgtgatgaaaacggcgaggtatgcgtccgattgacggggctcaccgcccgttttctggaagaggaaacggagggaaaaccgctcttgcttcagccaaagtggcaggaatcaccgccgggtgaaggcggcggacaagcagagtctttcagatacgtgacgctgtatggcggaatgaacgctgaggacataaacggcgccgtatgtgcggctgacggggaaggtccgattgaagaccgttatgacgcctgcgcggcggagctgtcagcgatcgtcaagcgtcttatcaaagaaaaacagaagggaaaaacgctgatccagcttcttgtccccgacaggggggaagacaatgtattggcggggctggccgctttcctgaaaacggctcaccttgaacatccgaagctgtacggccaagtcatccaagccgatccggacgagccagcatcatcgcttcttgccaagctgaaagaaaaccggacgcaccctgaacaagcggaaatccgttatgaagccggcaaacgtctcgtcagaaactggcgtcacctgcctgcgcttcaaagcggcgccgttccgtggaaagacgaaggggtttacctcctcaccgggggagcgggcggcatcgggctgattttcgctgaagaaatagcctcccgcgtcaaaaacgccgtcctcatattaacgggaagggcggaagcgcttgataaagaccgctccgcccgcttacggcgcttggaagcgtcgggtgcccgcgtactgtatcaaccggttgatgtgacagacagggcggcggtcatcgccctcgtccgcggcatacaggaggagcacggaacactcgacgggatcattcacggcgccggcgtgatcgccgacaattacattctgaaccagacagaaaacgaacggaagaccgtcatggcgccgaaggtgaaagggcttatcaatcttgatgaagcagcgaaagatgcgcggctggactttttcattctgttttcttccttggcgggaggtatgggaaacccggggcaggccggttatgcggcagccaacgcatttatggacgtatatgcagcccgccgaaatcgtctcgtgcgggacaacaagcggagcgggcagaccctgtccgtcaactggccgctttgggaagagggcggtatgcgcgtggacaaagagaccgaacggctgatgtatgaacagaccggaatgaaagccatgcgatcggcttcaggcatccaggcgctttacgccgcttttgcctccggagaacaccagatcatggtggcagaaggagatgaaaaacggattcgcagccatgttttcgatctgcgtgaagaacaaagcgccgccgcaaaagctccggcagagacagatgcaggagatctgaaagatcgggttcaagagaaactaaagcgtcatgtatcagatcttttaaaggtaagcatgaaagatattgaggctgacagcgaactgacggaatacggatttgattcgatcatcttcactgaatttacaaatctattaaatcggtcttatcagcttgagctcagcccgactatcttctttgaatttccgacattgcgcaaactgagcggccatttgatatctgaatggaaagaagcattcagcggcttagaaagagagaattttaaaaccgccccaaaagccggaataagaaaagctgaagctccggcggccgttcatgtcaaacgggaaacgcccgtatccgtaaaaggaaaatcagaagaaaaaaccgaaccgatagccattatcggaatcagcggtatttttccgcaagcgaaagacatagatgaattctggacacgtttatcaaaaggagagcattgcatcacagaaattccccgggatcgctggaattggcgcgaatattacggcgatccggcagcggatgcaaataaaacgtcaattaaatggggcggttttatagatggaatcgccgggtttgacccgctgtttttcgggatatctccgaaagaagctgaaatgatggatcctcagcagcgcctattaatgatgtatgtgtggaaagccattgaagacgcggggtactcggcaaaacggattgccggaacaaaaaccggcattttcaccggcacattgggaagcggatatcaaaccttaatcaataaggcgggtcttcctgtcgaggggtatacgatgaccggaatcgtgccgtccgtcgggccgaaccgaatgagttattttcttgatatccacgggccgagcgagccgatagaaaccgcttgttcaagctctttagtcgccattcaccgcgcggtaaaagccattgaaacgggagattgtgatatggcggtcgcaggaggcgtcaacacgatcgtcacgccagaagggcatatcggttttcaaaaagcaggcatgctcagtgaagacgggcgctgcaaaacattttctgatcaggctgacggttatgtcagaggagagggtgccggcatgattgtcttgaaaaagctttcagaggctgagcatgacagggatcacatctacggcctcatccgcggtacagcggaaaatcacggcggacgctcagcgtcacttaccgcgccgaacccgcaggctcagacggatgtgctgaaaagcgcttatcaaaaagccggtattcagccgtcaacgatcacttatatagaagcgcacggaacaggtacggcgctcggagatccgattgaaatcaatgcattgaaaaaagctttccaaacagacggggctccgggcggatattgcgggattggctcagtgaagacaaatatcggacatttggagctcgcagcaggcattgcgggcgttatcaaagtattgatgcagctgaaacatcggacgctcgccaaaagtctgcattgcgagaacatcaatccccatatcaaattgaaggacagcccgttttacattgtgacagaaacaaaggagtgggaagcgctgcgtgatgaaaacggccgggtcctgccccgccgggcgggtgtaagctcattcggtttcggaggcgtcaatgcgcatatcgttattgaagaatacatgggcaaaagtgagacggaacagccggaaacccgtgagaaagcgtcatctctttttgttttgtcggctaaaaatgaagagcggctgaaagaaagagcgcgtctccttcgcgattttatccaaaacggatcatcccgccatatcgatcttgcagatgttgcatacacactgcagaccggacgggacgcaatggaagcgaggctgggaatcattgcaggctccgcagaggaactgactgaaaaactgaacgcgtttctgacgggaaaaaacagcgaagatatcatcagcggccgtaaaaaacgcgagaataacacgatctccatgttctcagacgatgaagacgcagctgacctcgtcagcgcctggattgagaaaaagaaatacaagaaagtgctgcggctctgggtaaacggatttgacacagattgggagcagctgtatacggacagtaagcctcgccgcatcagcctgccctcctatccgttcagagcagaccgctattgggtgccgaaacgggagcagctgccgctttcgaatcaaaaaacagtagtattgcagaaaacatgggagccttgcgaggcagtgtcttcatccgagccattcagcaaaatagcgctcatcgtctccgaggatacaaaagaccttgccgccgaggtgaaaaaacagctgaatgatgctgacattgtgcaggaaaatcagctcatctctttcttacaggatgcgaatgcggccatctattccgggtttattgacttcaccggctgcggctcccgacaaaagcggcaggacatcagctgggtggcatcgctgcagcagctgattgaatacggccgcggaaaagaaaacatgaaaatgctttatcttacaaaaggccttgaatccttcaaaaataatgcggccgctatgcatggtattgaaaaagcggggctttatcgcatgctgcggcatgaatacagccatattctcacctgtcacgccgatattgatcctgaagagccgctggagcagacagccgcttttattaaacaagaaattgaatcagacttaacggaatctgctgtttgctacagggacggcatgcgcttcagctatgttcttcggcagactgatcagattgaaccagaagccgtgcaaacagaccggactgtgtttccaaaagacgccgtcctcatgataaccggaggaacgcgcggactcggcgctttatgcgccaagcatttcgtttccgcatacggtgtgaagaaactgcttctgacaggcagaaaggagctgccgccgaaaacagagtgggatcttgagcaaacagaccctgtcgtttcggaaaaaatacagcttatccgaaagctggaatcacagggcgtaaaagtgtgcgtctcagcagttgatctgacggataagcaggccgtcggacggcttataaaagaggtaaccacaacgctcggacctgtcggaggcattctgcattgcgcaggaattgcggaccgtgaaaaccctgcttttctccgcaaatccaaagacagtatcgcgcgggtgctcgcaccgaaagcagacggcctccgcggtctgtatgagagtgtaaaggatgatgcgccggcatttttcgtcctgttttcatctgtctcggcagccgtcccgattcttgcggcgggacagagcgattatgcgatggctaattcttatatggactattttgcagaaaacaatgagggcggcatcatgagcatacaatggccggcatgggatgagacgggcatgagcagggatacaaaaagcgggatgtatcagcaaacgggattgctgcgtcactctgacgcggaaggtctcaagatgcttgattacattttaagagaaagacccggaactgtcgtgctgccggcacaagtgaaaaatgattgggacatcaaagcgcttgaaaacgccaagccagccgcccataaaggaatgagaacagcttccaaacctcctgaaacaaaaaaacgggtccataaccggactgatattcaatcttggctgaagtcgcttttggcaaaagagctgagtatcgatgaaacgcatatggatatcgatgtgccttttcaggaatacggaatggattctatctttctggcgcaagtgctgacaaagatcgatcaaaaactgccgtccgtttcaattgatccgactgtccttctggaacaccctaccatagaacagctcgcggattatttagccgcacattgtccggaagctttttcggcagatgcagcggttcccgcggagaaggtccctttgcagaaaacgccgaaacagagcaaaaaaacggcagataagcccgggaaacggggaaaggttgcgatcatcggcatggcctgtcattttccggaagcgggggatataaaagaattttggaagaatctccgcagcggaacggatgccgtcactgaagttccgccggacagatggaacgccggggaacactatcagccgggtgaatatcaagaaggaaaaagcatcagtaaatggggcggttttattcatgatattgatcaatttgacccggagtattttaatatttcagaaacgctggcaccgatgatagacccgctgcaaaggcagtggctcgaagtgagcgcggaagctttggccgatgccggttatcaaaaagaggatctctggggccgccgtatcggcgtttttgccggtgcaagggcaggtgcgtttcatcagaaatttcaatatttgcaaaaagacgcgattattggcgcggggcaaaattttattaccgcacatatggcgcacatttataactttacagggcccaacctggtcgtagatacggcctgctccagttcgcttacggcaattcatttggccgtgcaggctattcaaaatggagaagcggaggcggcctttgcgggcggggttgacattttgcttgatgaaaaaccttttctcacaatgagcgcggcgagaatcttatcgccaaatggccgttcaaaatctttcgatgccgatgcggacggaacaggaatcggagagggctgcggtgtgctgatgctgaagccgctcgaaaaagcgatagaagacgaagataaaatatacggcgttattgacggctctgcgataaataatgacggcagcacaatgggggtgactacgccgaatccccgggcgcagcaggacttgattgagcaggcggttcaatcagcggaaatcgagccggacaccatgacatacgtagagacgcacggaaccggtactttgatcggcgacccgattgaattaaaaggattaaccaatgtcttgtctgcttattccgatgaaaaacaattttgcggtgtagggagcgtcaaaagcaatatcggccacttgctgagtgcggcgggcgcggcgggaatcatcaaagttttgctggcgattgccaatgaagaactgccgccgactttgcattgccataaaccgaacccccgctttcaatttcatgattcgccgctttatcctgtgcttgagctgaagcggtgggacggaaaaaaagagatactcagggccggggtcagcgcgttcggtttgggcgggaataacgcccatatcattgtcagcaacgaaggaattccgaaagaacgaaaagcgaccatggaaccgaaaggcggccagacagtataccgaaaacagcggtattggcctgaaaaagcacagttgtccgaagcggaagaaaatgaggcgggcacagaagcaatgtttgaaataagcgaggtgtgatagattggcagttgccaccgatcaagtcaaaacgttcctgcagaaaatcagccatacgaattatatcgtccgggatcatcgcgttcaccaaatccgcgtcctcccgggcgtgactttaatagatatgctgtatcggctcgccgccgggtatctcggtgaaaggcctatagaattaagacagattatttttaagcagcctgttgtaacatctgaagagtttgataaacacctgtatgtcacctttacgccggcgcgtgacagctggaaagttgagattacaagcgaaaaagcaaaaaacggcacaccgcttggcggaaaacgggatgagaatatggaatgtcagctttatttgcaaaaagacacgccccgggcaaaagagctgaatattgaagcattcatgaaaaacgcaagccgaaaatgggacatgcatgacatttacggaattgcaagaagaagccatattgagcatggcgagtttatgaaaaatgaaggggccgtttatcagcttcaggataaagaagaattaatggagctcactctgagtgatttggctgaaggattccgggagaaattcaaggcgcatccggcttttttagatgcgtccacccttgccggctcttcctttgcattgtcggcccaaaagcagaatgacacaccgtatattccttttatgattaatcgtttttgcatatatcagccgtttccgaaaacgatttacacttattctgcggaaaacagccgcactgaaagcggcgcatcagatagcgaacctgatttttattcggccgacttcacgatttacgacagggaagggaacgtattggccgaatgtgagaaactgacagtaaaaagggtcagacaagcgaatatgattacccatctgatagacaaagagaagccgcctcagcagaacaaaaacggccgtggagagcccgaaagtcctgtggccgcagaagacgtgtctgaacagcaaacgccggaacaaaacatggtgacttacataaagtcggaaatcgccaggctgatcaatcgtccggcacaggatattgatgtgcggaaaggcttttatgatatggggcttgactcggcgcatttgctgaagcttgtaaagatattagagcagacttttcagcagcagttttatccgacactgctttttgaatattcatctgtccgccgccttgcggattaccttatcaatgaagcgggctgtgtgctgaaagattcggccgaagaacggcatacatcagacgctgacatcgctgatgaggttctgttttttgaacccgcctggaaagatcatccgctggaaacggcggtgcagaacgggcaaaaacacacccgtcatcttattattgctgccgatgcaggaccccgtctcaccggtgaactcggcacacattgcccggaagcggaagtgatagaactgaaaagggagcatgaggttgcagatgagcagtttggagcagatgccgagcttatatttcgtatgcttaaacgggaactgacagaccatccgaaagaacatacattgattcagcttgtatgcgccgttgagaatggagcggcattgtcttccgctctcggggctatgctgaaaacggcacatctggaaaatccggctcttcgcactcaggtgatcaccttctgtgacaagaatgagagattgccaagtgagacggccgcaatcattagaacagaagcagactgctctcatgcaggctgcacagacattcggtataaagacgatatgcggcagatcagattgttcgaacgtattgagaaaccgggcggacagacacagtctccttggaaacaaaacggcgtatatgtcattacaggaggtctcggcggtcttggatttctgcttgcccgtcaccttgcagaaaaagaaaaggtgaagctcgcactcatcgggcgttcgccggaacagtctgagaagatcagcagactgaaagcattgggagcggaagttctttacgttcaagcggacatcggcagcaaagccgaaacagagcgggcatttgctcagattacagaaactttcggccgtctgacgggcatttttcattgcgccggtgttttaaaagatcaatttatcatccaaaaagacagtactgacttgaagagggtgttcctgccgaaaatcagcggcctgattcatgcggacgaagcttcacggcatgaaccgcttgaatttttcgccgcattttcctcattctcggcgttgaccggaaatgcgggccagacagattatgccgcagcgaacgcttttatggatgaatatatgaaatatcgcgattgcaaagcggaaaaaggcgaacggaccggggcttctatgacgatcaactggccgctttgggaagatggcggcatgcaggttgacagtttgatgaaagagatcatgaatgatgcaaccggcaccagcccgcttccggccggggaagggatggcttcactagaatatatgctgcgtctcggcaagctgcaatccgttattttatacgggaaggagcctgctgtaactgaaagcatggcccgattggttccgatggcagacaagaaccgctcttcattatcccatgcagctgtcaagagaaggagccgaaaacaagagagacatacagaagagcacgatattgccgtaatcggattggcgggaagatatccgcaggcgggaagcatcgatgaattttaccaaaatctgcgctcaggtaaagactgtatcacaacaatgccgaaagacagatggaaaggttatcctttctcatatgaagcagatcagttctactgttacggaggatttttagatcgcatagacagctttgatccgctgtttttcaatctgactccgcgccaggctgaaatgatggacccgcaggcgcggctgtttttagagacggcttgggaagcttgtgaagatgccggtttttatcaggacagaacggcgcgcgggccatcttcacaaaaaagaaaacgcgtcggggtattcgcaggtgtgttttggagccattatgagctgttcggcgctgaaatcacacagcggggcacaccgctgtctatgggcgtgacgcctgcctccgttccgaatatcgtgtctcactgcctgaactttacagggccgtcaatggctgttgatacgatgtgctcttcttcgctcacatccatacatttggcatgtgaaagcattaaaaggggggagtgcgaattcgccattgccggcggtgttaatgcggtcacacatccgcataaatatgcgtttttggcgaatgccggatttctgtcttcagaaggcgtctgcaaaagcttcgccgacggcggtgacggctatgtgccgggagaaggcgtcggcgcggtgttgctgacaaccgttcaagaagcggaaaagatgggctgtccgatatatggcgtcataaaaggctccgctttaaaccatgtcggaaaaacatccggtttgaccgtgcctgatccggcatcacaggcggaagtcattacagattcctttcagagtgccggcattgatccggagacattgagctatattgaagctcacggaacgggtacgtctctgggtgatccgattgaaattgaagggctgagccgcgctttccgcaaatggacaaacaaaaagcggttttgcgccatcggctctgccaaatcaaatatcggccatttagaaggagccgccggaatcgccggattaacaaaggtgcttttgcagctgaagcatggagaaatctttccgtcattgcacgcggacacgctgaatccccatattccatttccggatacgccgttttatgtggcggaccggctggaagaatgggaacggccgtcacatcctgaccagccgagaagagcgggtttaagttcttttggcgccagcgggagcaatgcccattttgtcatagaagaatatctgccgccgcaggctgaaaagaaatcgctgagtatacgggaagacgagccggttctgtttctgctttcggcaaaaaatgaagaacggctattggaatatgtcaaacggtatgaccgctttttacgggaaaaagaagtcaatcttaaagacctggcctacacgcttcaagcgggcagagaagcgatgcctgaacggctggcattgatcgttacatccgtttgcggcctgcaagcgaaactgaaggatgtgcttgaacggaaaacggaaattgaagggtgtttccgcggacgtgctcaagatgttatttcaacaagtggaatggccgagcttttgaaaaacaagcaatattccagattgctcacggagtgggcaaaaggagccgccgttgactggagccagttatacgaaggagagaagccgaaacgggtcagccttcctgtatatccgttcgcgaaggagcggtattgggtgcctgtgcctgcggatatccggaaacagacagacgaaccggcggaaaaccaaaagatcattcttcaaaaagactggaagcagcaagatccggcggagtctgaagcattatcaggaacagtaatgatacttgcaactgataagacgagccgattggccgatgctctatttaaaggaaacggccatattgaaacgatctgtttcatccatcaggcaaaagacggcgccgattattacgctgccgcatcggggcgaaacctttacggcagagtgcgggagtctcttcaaaacaaacagatactcggggtcgtcgacataaccgcatatgatgcggaatatgaacggcgggaagagatagaatacggaaagcttgcctttttacagcaggttctggaatcattccgtcatagcggcgctgtgctcagccaagtgacacaccgcctccagcctttcaaggaaagtaaacctctgatgcagggggcgaaaacggcggggctgtaccggatgctgggcgctgagtatgccaacattcattcttttacgatagatagcgattgtgcgattgagcatacagaagaattaagcagacagattgaaactgaatttttacagccgcgggccaaaagcggcagtgaatgctgctacaggctgaatcgccgttatgtgccgtttctgaagccgggtacgaatgtgtctgcggtgcctgagctttcctattcgtctgatgatgtgctgttaataacgggcggatcgcgcgggatcggcgcaattgcggcggagcatgccgtttcacgcgggtgcagaaaactggtcatcatggggcgggagccgcttcccgattcctcggagtgggaagacatgaaaaaggacggcattctcccggaaaaagccgagcggatgcagaggttagccgagcggggcgcggagatccgttattacagcgtttctcttacggatcaaaaggggctccggaacatgacggacagcatccgcggcacaatgggaccgattaccggtgtttttcattgcgcgggtgcaatgggagaacaccccgctttttataacaaaaccgaaactgagatcgaaagcgtttgcacgccgaaagtaacagggcttggcggtctctatgaagccgttcggaatgagccgctgtcgttttttattttgttctcatccgtttcgggtctgatcccttcgcttgctgcggggcaaagtgactacgcgatggctaattcatttatggactcttttgcaaatcatcaggcaggcaaaggaaacgtgtttgttaaagccgttcaatggcccgtctggaaagaaaccggcatggctgaaggcctgccggaaacacctgcttatcaaaaatcaggactttccaggctgtctgccgaagacggactgaagtttttagattacatcatattaaacggacaaagctgcggaattccttgtgttcccgaagacagtaaggctgattttggtgatcttctgaaggtgaagaaaactgaagctcccatgaaaaaaagcagtgccggtgaccaaaaggtgaaggatatgattcgtcaatgggtgcgcaccgttttcagcgaagaactgaaaatgacggatgagcagataaaagatgatatgccgtttgatgaatacgggattgactcaatactctttgcggaattggttcaatcattgcaaaaacggatcagcatcaagttaacaccgtccttaatgcttcaatatcaaacgattacagaaatggttgactatttcgcagcgcatcatgaagccgattttgtgacaaaagaaaatggtttcgttcaagacggggacgttcagcctgatgtaaccgccgccgctgaagagagaacatccatgaagccgaaagcggataccgaagacgatattgccgtcgtcggcatctcctgccgttttccgggggcgggcggaacggatgctttttgggagctgctgatgaaagggaatactgccatccggcctgtccccgcatcgcgctggcatgcaacagcaaatgcaaaggattatgcggggtggattgatgatatcgacatgtttgatgcgggctttttcggcatctctgaaaaagacgcggcaattatggacccgcaggcgcggatcatattagaagaagcggttcattccgtttatgatgccgggtacggccaaaaggatttgtcgggccggaaagtcggcgtgtacatcggcggcagggcgcagccttcagccggtatggaacatatcctgcaggcgcctaacccgattttgggggcggggcaaaactatttggcggccaacatttcacgatttttgaatgtcacagggccgagccttgtcgtggatacagcatgttcctcagggctgatcgggctgtcctttgcaaaagacgcccttttggccggaaggattgacgcggccttagtcggttcggtgagtctgctcttatctccgtccgcgcaccggttattcggagcgcgccatattttaaatgagaacggcgtgtttcatatattcgaccgtgaatcagcgggagaagtgctcggagaaggagcgggggcggtttttatcaagcgattgagcgatgcggtgcgggacggagaccgcatttacggcgtcataaaagccgtctcggtaaacaatgacggccggacgctcggtcccggttcaccgaatataagagcgcagagagatgtcattcaaactgcgcttaatatggcggaaaagtcgcctgaagacatcggatatatagaagtgaacggaggcggttccccaatcgttgattcggtggaaatcaaggcgctctcagatgtctatcagctgaaccggaaaacgcttctgccctgccggatcggatcggtgaaaccgaatgtagggcatttgcttctgtcttcaggtcttgcgggcttcatccgatgtgtgctgagcgtctatcataagcggattccgcctttcttatcagcgcgtgacccatttgaacattatgactttgaagcgtcgcgtattcattttaatcgtgaacccgttgattggcattcagagaagaaaccccgcgtcgcagctcagagttcatttcctgacggcgggacaaatgctcatatcctcgttgaagaatacagaggtgaaagacagcgggaacatcaccggtcgcctcagccgccggaattcagaaaaaaacactacccgctcttgggcggctggaacagcacggaaagtgaaccggaaaaaacaagtaatgaaaaaacggacattgcggatcttttaaagaaatatgagaaaaaagcagagacaagcactgcacctgcagactcgttttggcaggtgacaacgtgacgtttttaaaaggggactaaccatgaaaaaaacagtgaatctgcgcctgacggcagagcatcccattatgaaaaaccatcttgttcacggagaatctgtcatgcccggtctggcctatattgatatgctgtatcagctggcaaagcaaagccttgatctttcattccgttccatctgtctgaaacgggtgaccatttatcatcctttatcagtgaagcggtcagagcggcttgatgtgagtgtcatattcagtaaagaaaaggagttctggactgcctcgatttgcgaggcggattccgggacggttttcttatcagcggagatgcatgaagaagtcttctcatcagacaggcgtcttgacgcaggggagaaaaaacaacaagccgcacttccatcagtctccttgcatgcggtttacgaagccgcgagaagccgcggactgtcgcatgacgggctgatgaagccggagggagagatctatgcttatgaagaggcatgtttccttgatattcggcagtctgattcatgccgggaaaatctccccggcgctctctttcatcccgcgctgatggacggtgccgccatggcctccggcgtattgcagacagctgcaggcgccgagttatttttaccgatttattatgagtcgtttattgccgctgagactgttacggagcgctgttacgcggtgatttcgaaaaagtccggcacgccttctgaaatggtgaaaatggatattgacttttacaacctcagcggtgcgcatattgcttcactgctcggcctgacagccaaaaaggtgcggtttgaccggcagctgataccaggcgttcagcagatggaggaaaccttataccgcattttctcgacatacgtaggccgttcagtcacaagaaatgatgcgcacaccgtgttttttgaattaggtcttgaatcgtcacagcttctggctattattaaagacatcgaaggggcgtttgatctgcgtctgaatccgactcttttatttgagtgcagcagcatatccgaactgctcgaagacataaaaacaaaaggaacagatgaatcttccagccttgtcgcagatgcagcaccggtctctgaaacacaatcaggcagtcagacatttactttctatgaacatgaagcattccttcaggatcatctggttttcggcaaaccggcactgatgggtgtagtgtatccgtgtctggtgcttgaagcatccggagcgtctcattccggcacgtgtcccgccgagctgaaagatatccgctttacgggcgggcccgtcacgctggagcctggagaggccgcgcagattgacatttcatttgcggcagaaaagagtgccgaacgctttacagcaagctgcactgtctccggtaaagaaagccggaagacatgtgcggaaggagaaataagcagatatacagaggcacccataaaaaaatcatatgacgttgagcaaatgaagtcgcatgcacaaaaggtggcgccggatgtcatttcccgtctgtacgattcggttgccgacttcacgataggcccgatgctgaaaacggtaacagcgggatacaaaatgagtgagagctcctttttattgcagctggacttatcaggaaaaaaagaaaaaggcgatctgcatcactttgcatttgacccgcttatattgaattcatgttatatgtcgctcggtgaagaagaattgcagctgaaaaagcggattcacgtcccgctcatgattgagaggctgacgctttacggacctgtcatgtctgataccgtctatgtggtgaatacaatcaaacataaaaaagacgggtttctctcatttgatgccgcaatcctcagtcataccggggaacagctggcggaattgaaaaatgcgtctgtgaaagaagtgcttcagccaaatcggcttgaaaatgcgtcttttgccccgtccgggaatcaaagccgtcaggaaacgaaaggaaaaccgctggatattgccattgtcgggatttccggcaagtatccgcaggccgatgatatcgatgcgttttgggataatctcaaacaaggcaaggattgtattaccgaaattccgaaagatcgctggaaatgggaacattacttttccgaggaccgtacggcgccgggagcgatctacagcaaatggggcgggttcattgacgggatcgccgattttgatcctgagttttttaagatttccccccgggaagcggaacaccttgatccccaggagcggctgtttttaatgcatgcttggatggccatggaggatgcgggatatacgaggacatcacctgaactggggcgtcaggtaggcgtgtatgccggtgtcatgtatcaggaatacccgctattcgcggctgaagcgggagtgaaaggacggcatatcgggctccccggcgggatttcatccattgctaaccgtgtctcctatttttgtgactttcaagggccgagcatttcggtcgatacgatgtgttcgggttcgctgacttcattgtacatggcgtgccgggatctgcgggatcatcggattcgcgcggcgcttgccggcggagtgaatctcaccgttcatcctaacaagtacttcatgctgagccaggggcagttcatctcatctaaaggacactgcgggagtttcggcgccggaggtgacggctatattccggcagaaggggtcggggtgctgcttcttaaacgtttagaagacgccgtacaagacggagatcggatttacggcgtcattaaaggagctgccattaatcacggcgggagagcgagcggttacaccgtcccgaaccccaaggcgcaaagcgaagtcatttctcaagctttacaggaagcgggggtatctccgggccggatcagctatgtggaagcgcacgggacagggacgaaattaggcgatccgattgaaatccgggctttaaccgatgcattcggtgatgttcctgaaacatgtcttgtcgggtctgtcaaatcaaatatcggacatggggaatcggcagcaggcatcgccgcagttacaaaagtgctgctgcagatgaagcacaaacaaatcgccccatccttgcatgctgatgttttaaatccgaatattcaatttgatgaagggccgttttccgtctgccgtgaattaacagattggaaacggatttcagcagacggagaagaacagccgctcagggcgggaatcagcagctttggtgcgggcggttctaacgcgcatatcattattgaagaatatgaggctcctgtcaaacaagcaatcagcagccaagagccggcggtcattctgctgtctgcgaaaaatggcgagcgtctgacagaatatgcggagcgccttcttgcttttcttcaaaagaagcatattgataagccggacttatttgatgtcgcgtacactttacaagcggggcgcgaagcgatggatgagcggctggctctcattgcggactcccttaaggagctggaggacaagctcagatcgtacttggaaaatgaaaacgcaccgcatctttacaggggacgggcgaagcgaaatcatgagacagtggctgtgtttgaatctgatgaagatttgcaggaagcgatggttaaatggctgaaaaagagaaagtacggtcatttgctgaaaatgtgggtgcagggagtcgatgtggactggaacttgttatattcggaacaaaaaccccggagaatcagtcttcccgtctatccgtttgcaaaagtcagatgctggattcaagatgaagccgaggcggtttcaaaaagggatgacggcaaaacggtgatccatccgctgctccatgaaaacacatccgatctttgggagctgaaattcacctctgtttttaccggacgggaattctttttcactgatcacacagttaatggacagaaggtgctcccgggagccgccgtgatcgaaatggccagagcggccgttgagcgtgccgcatacgctgtgccggacggacgtaaaggaatgtatttgaaagatctcatatggatgaggcctgtcattcataaagggacggatgtagaagtccatatcagccttattcttaaggaaaatgaagacattgaatttacgatttacagcctatcggaagaacctgggggagaacggattttatacagtaaaggcactgcggtatcgggagagatagcagcggttccgtctgttcatttagagggctggctgtccggctgcagtcaatcggttatgacgtctgatgaggtttatcaggctttccggcatgcgggtatgatctacgggccgagccatcaaggcattgatcagctgatgatcggagagaggggggctgcagcccggctgtcgctgccggaaacggcagacagtaccgccgatcagtttgtcatccatccgagtcttctggatgccgcgtttcaggcgtcactgggggccggttcagatactgccggagacactccgatgctgccgttttccctgcggcaggcagaaatatttcagccgactcagaaaacgatgtgggcgcttgtccgcaaacagagcgatcggtcagataacggagcgctgacgctggatattgatttatgtgatgaaaacggcgctgtttgtatgagattgacgggcttctcctgccgggctgtccggcagacaaaccaaaccgaaagcaaacggcaggaagttcagacggcgatgcttgcccctgtttgggacaaaactttcttttccctggaagaaaatcgagcggttgatcaggaacaattgctgatcatcggaaagccgggaaataccataaaggccgcggcaaaaatgtggccccgcgcccatctggcggagacgccggatcattcaagcgagcaaacattacgtgaattgacagccggttatcaagatatccgccatttcttatggattgcgccggatcgtttcgcacccgcatccgccagtcaggaaatgcttgatgagcaggagaatggggtgattcaatgtttccgtttcatcaaagcgctgctgtcactcgggtatggaaaccgaaacatcagctttacggcggtcacccggcagacacagtccgtgtatccgggtgatctcccgcagcctgagcatgcaggcgtacacggtttgatcggttcattggcaaaagaatatccgaactgggacatcaggctgattgatgcagaagaaggcagtgattcgtctgagatgaaaaacatctggcgccttcctccagatccggacggaaatgctgccgcgtaccgtaacggagcttggcacaagcaaaaaacagtccgggtgctgacaagttccgctccgcgtatgtcgtacagagaaggcggcgtttatgctgtcatcggcggagcgggcggcatcggagaagcatggagcaaatacatgatcacccgttacaaagcacggatgatatggatcggcaggcggccgaaggatcaggagattcagagcaaaatagacaggctggccctatcaggccccgcgccgcattatatacaggctgatgctcaagatgccgcagcgcttaaagcggccgtccgttccataagagagcgatacggcaatataacgggagtcatccattccgcgataacgcttgccgacaaaagtatggcgaatatggatgaagcttctttcagaaacgctttttcagctaaggtgaatacgagcgtccgaatgatcgaagcttttaagggagaaccgcttgattttgtgctgtttttctcatccgttaattctttcacaaaaaatgccgggcaaagcaactatgcggcagggtgtacatttcaagacgcctttgcccgccatatcgcttccttgcttgattgtgaagtgaaagtcatgaattggggatattggggcagtctgggcgttgtatcagacccgtcttacagaaaacggatggaggcgtcagggatcggttctattgaacccgatgaagcaatggaggcgctggaagtcttactatcagaaccgttcagccaagcggcattcatcaaagctgctccgcacggcttagccgcactgacggatcaagatgcaatatcggttgtatccggcccggagccttcatttatggaaagcgtcaagcggcaaaatccggatcggaatgaacggcttgagactttaaaacgagaaatggagttgcgcatatgaacagccttctttgcaaactgctcttttatcaattacagtcaatcgggtttttcagcgagcctgtcaccacacctgcagcatccatgcggagcgccggcgtgatcggcacatacggcagatggctggaagaaagcctgaatctattaaaagaaaacggatatatcgcgtatgacggatacacgatcactcttctcgcggatcagcgcccggacggccgcacagtctggaatgagtggaatgcccataaacgcctgcttcccaagggggagcttgcgcaagctgaattggccgaggcgacgataaaagcgatgccttcaattttaaaaggagaacgtccggctacggatatcgtatttcccgattcatcaatgcggctcgttgaaggtgtttataagcataatcccgttgcggattattttaatgaagtgttagcagattccgcggccgcttacctgaaagcctaccttacagaacatcccgatgcccgtatcaggctgatagaagtaggggccgggacgggcggaacgagcgccatgctgtttacaaaactgaaaccatttgcaaaacagattgcggaatattgttatacggatgtttctaaagcttttttaatgcatgccgaacaggaatacggacctgatgtgccgtatttgacaacagccttgtttaatgcggaggagccttgcgaatcacaaaatatcaaaacgggtgtttacgatattgtcatcgccgccaatgtgcttcacgccacaaaaaatatcggtttgacactgcgccgtctgaaagcgctcctgaaatacaacgggatgattttgataaacgaaatcagcgatcgttctgtttttacccatttaaccttcgggctgcttgacggctggtggtcctatgaggatgctgagcttcggattccgggaagtcccggcctatatccaaaatcgtgggagcgtgtgctgcattcggaaggatacagagcggtttgtttccctgctgaaacggctcatgatttaggtcagcagattatcgcagctgagagtgacggactcgtccggatgcaagggatcagagacggcagaaagccatacgccgccccggccgaagttttccgaaagcccgcacagcctgtttcccgcagccgcgcgccagaggagcatcaagctgttaaggctgatggggaatcggtcgcttcccatgtccgctctgtcatcaaaacaagtattgccgatgtattaaaaatgaaagaagaggatattcaggaagaactgaatttctctgaatacggtattgattccattttggccgtcaatgtgattaacgagattaataagcgattgaatcttacactgcagacaacgattttatttgattactatcatgtgaaactgctgaccggttatatctcggcagaatatgaaaccatcatagcctcatctctggagaccgaaagagcgaaaatccgcccggtgcttcaggaagaacggcctgctgaaaaacctttgaagacggatagaaaggaaaacggttatcagaaaccgaaacaagaacggatgccgctttctttcgcaaagtccgatgactcgggaatgttccgggttgtgattgaccgtccgggcggcattgaagatctgacgattgcccgcagtgaagtgcccgagacaaaagatgacgaagttcaaatagccgtccgcgccttttctttgaacttcggagacttgctttgtgtcagagggctgtatccgacgatgccgccttatccgttcactccgggattcgaagcaagcggcgtcgtgatcaagacagggaggcatgtaacatccgtcattccgggtgatgaagtgattgtcggtatgggagaggaatttggctctcaggcgaatctcatcacatgtaaagaacatcaagtctatcataaaccggcccggctgacctttgaagaagcatgcgctcttcctaccgtggcagtgacaatgatagacgccttccggaaagccggacttaaaaaaggcgaaaaaatattaattcagaccgcgacgggaggaacggggctgatcgcggtgcaaatggcccggcatatcggcgcggaaatatatgcaacggccggatcacagaaaaaaattgagtatctgcattcgctcgggatcaacaataccatttgctatttggaagaagattttgaaacggaaatcatgcgaatgaccggcggccgtggggtggatgttgtcattaataccctggccggtgatgccatgcaaaaaggaatgaattgcctggcgccgggcggaagatatatcgaaattgccatgactgcgctgaaatccgctaaatcagtcgacttgtccgtccttcataacaatcaatcgtttcacagcgtggatttgcggaagctgtctcttcaaaatccggatcaggtcaaggactatcaattggaactgcagcggctggcggaagagggagtcattcagcctgtcatctcaaaaatcttttcctttgaagacataaaagaagcgtatcactgtctggatgaccgcggaaatatcgggaaaatcgtcatcagcgtttctgagccgtatcaaatgacgtaccgccccgaacaaaaggatccggccgaaacggtaaaatcagcagctgtgttacctgaaaaagaaccgatcgcgattatcgggatgagcgggcggtttgctgaatcggagaatgtccatgagttttgggaaaacttagccgccggacgggatctgattaaaaaagcagacagatgggctgtctctgacagtcaatgccagtatggcagttttatagagggcattgaatgttttgatcccgttttctttcatatatcgggacgtgaagcaacctatatggacccgcagcagaggctgtttctggaagaatcatggaaagcgcttgaagatgcgggatatgcgggagactcggtaagaggccgggaatgcggcgtgtatgccggctcctgcggcggagattaccaggccatttttaaacagcaggggcccgcgcaggctttttggggcaatcacaattccgtcactccggcaaggatcgcctatcaccttaatttacaagggccggcgatcactgttgatacagcatgttccagttcgctgacagccattcatttggcatgtcaggggctctggacgaaagaaaccgaaatggcggtggcgggcggggttttcattcaatccactcccgctttttatcagtcgtcaaataaggcgaatatgctgtcaccgaccgggcgctgccatacgtttgatcaaagcgcggacggcttcgtgccgggtgaaggcgtgggagcggtggtgctgaaacgtcttagcgacgccgtcagtgacggagatcatgtgtacggcgtcataaaaggctctgcaatgaatcaggacggcgctacaaacggaataaccgctccaagcgcgctttctcaagaacgattggaacggcatgtctatgatacttttcacattaatccggaaaccattcaaatggtggaagctcacggaacgggcactgcactgggcgacccgatcgaattcagcgccttaacgcgcgctttccgccgctatacggataaaaaaggatattgcgccatcggctctgtgaaaaccaatctcggacatgccgctgcggccgcggggatggccggattgtttaaaatcctgctgtcgctgaagcatcggcagattccggcttccctgcattttcatcaagccaatcagcatattcaatttgcggacagcccgttttttgtgaatgaaaagctgataccgtgggaacggaatccggatgcaccgcgcagagccgcgatcagttcattcggattcagcggaacaaatgcccatcttgttattgaagaggcgccgcaaaccgtgcgccggtcaccggcaaaaccggcctgcctcattcctttatctgcgcggacggagcgtcagctggaaattcaggcagaacgcctgctggattcactcagcaagaacaaagacagcgatctgggaaatataagttatacgctcctgctcggcagaaagcatctgcatcaccggtttgcctgtatcgtaagcagtgcggacgaactgaagcgggtattatcggagtggcttgtaaaaagagagcttccgggtgtgtttgtgtccaatttgaaggaccagaagccggcagacgaagccggaatgaaaacattcggaatggaatgcattgaacagtgctgctcggcggcttcacccgcacagtacagagaaagcctggcacatatcgctgaccttttttgcagaggatatgatcttcctttcacacggctttttgacggagggcaatattataaaacgccgcttcctgcctatccgtttttaaaagaaaggtattgggcggctgatgtaaacagttctttaccaggccaagccatgaaaaagtctgaaacgcaaaccgttcccccgtctccgccacagcctgaacatgaaggtctgatttctctgagtcctttaactgagatcgaaatgacagcgtttgaaccggagacattgcaaaaaccgatcgtcttacagcctttggattgtactgttcctgtccagcagccggaaaacgccgtttccgaagacaatagaacattgcttgaagaattgaggataagcctggcagatattttatttttgtcgccggaagatattgatgctgatgagcctttcatcgacatggggcttgactccattatcggggttgaatggatacaaacagtaaataaaacgtaccacactgagattactgccaataaggtgtatgaacacccgacgcttgaggagcttgcggaatatatagcggggcaaataaagaaacccgagtatgctgaagcggaggaaacagcggtacgtccgcaaatcccggaagcagaaactccccttgccggcatctctgacggcactttgcgcaaagagcttaaagaaagccttgcggacatcctgtttctgaagccggaagatattgatgagcatgaggcattcattgacatggggctggattctattatcggtgtggaatgggttcagtctattaataaaacgtatcaagcgtctattacggcaaatctggtctatgaatatccgacaatcgcaaaattagccgggtatctgaccggttccgttcaaaaagacactgatgaagtacatgaggaacatacgaaacaaaacgatatatcagaagagacagatgatcaagaaccgcccgaactgatctgtcttaacccggggggaaagggaagaccgattttctggtttcattccgcgctgggggcagtggagctgtaccagcctgttgccgaacggaccgggcgtcctttttacggaattcaggcaagaggatggatgacagaccgggaaccgatccgcggcattaaaaacatggcggaatattacgttaagctcatacgtaccgtgcagccccggggtccttacgatgtaggcggctattcattagggggcatgctcgcttatgaagtcacccggcaattgcagctggctggagaaaccgttgagtcaatcgtcatgctcgactcctttgactcggcgggtgcgcgggaaataaacattcctgatgaattatttgataaaaatatgatgctgcagacggtgaacatggctttatttgcaccgatctatcaacatccggaacgcatttctgaaaccttgattcaccgtgatgaactagatgccgatcttcatgaagacatatttttagagcaattaatagcaaaagccaaacagcgggggttaacgaagacggacgcgttggtgaaaaatctgatcaggcagaatataaacgttcaggacgcttacgaaatcactgattacgaactcctgccgcttccggatccgaacggggtgacatgctattatttccgaaataaaaacggtattttcttgggtgagcttgatccgtattttacgatcagggccgatattttatccgctgatttcgtcaactactggagccagtggcaagagcatatgacaaacatcgccatcatggatgtggcggtatccaaccatatgacgttattggctgaagacagcgcagccgaaacgatttctgaattttgcggcgttttatattcggcagacggaatgacagaacacagctttctgaaactgcaggaaaagatactgaacgtgcatggtgagatgctgaagcagcccgccaaaataagaccgtaaattcacatatccgcccgccgggtttactcgtaagctttggcgggtcatttcaaatcttggacacatcttggaggaatgaaaatgaccagtttaacaaaaatcagacagcagcagccgtacaagtggtaccaaacgatgagagaaacctctcccgttcattacaatgaaaaggaagattgctgggaaatcttcacctatgatgaagtgaagcgggtgatttctgactacagtcatttttcttccgatcataaatacttaagtgcggacaagcaggaaaaaatgatccggcatattaacaaagacagccttttgaaaatggacccgcctgaacacaccgtcttcagaaaattggtcaatcagccgttcatgccgaaatcggttgagtctcttgcaccgcgtatagccgctatcgctgatgacctgcttcaggccgtccgttcaaaaggcaggatggacattattgaagattacgcatttccgcttccgattatcgtgatcgcagagcttttaggatttcctccgaaagacagggatatctttaaaagctgggtcgaccaaagccagaatgtaaaagatgaaaagaaaatgaatgaagtgcaaaagcagatgatcggatactttatgcagtttattttacagcggagaaaacagccgcaaaatgatttaatcagccatttaatttcagctgatttagacggagagccgctgtcagacaagcaattaatcggtttttgcggcttgttgatcgtcgcggggcacgtaacgacggaaaatgtgatcggaaattcatttctcagtctcaaggagttcccgcatattctgccccggctgcttgaaaataaggcgctccttcctgactttattgaggaagtcatccgcctcagaccttccattcagcgggtaacccgctacaccgcggttgagagcgagattggcggaaaaacgattccggccggagaaaaagtatatgcgtggattggatcggcgaacagagatgaaaagaagtttgaaaatgccgatcagattgacttgggacgaaagccgaatcagcacctgtcattcggtcagggcagccattattgcttaggagcgccgctggcccggcttgaagcgaaaatcgcgctttcccacttttttgaacagatgcccgcatggcgttttactgaggatcaagagccgaatctggttccgagccctgtatttcacggcgttgacaggctgcttgttgagttttgaacgaaaaaataaaagaggcttcgcgggaagcctctttactctgggggcttggagaaatgaatgtaggaatcgaagcaatgaacgtgtttggcggaaccgcgtatgtagacgtcatggagcttgcggaacatcggaacctggataaaaaaaggtttgagaacctgctgatgaaagaaaaagtggtggcgcttccgtttgaagatccgattacgttcgccgtaaatgccgcaaaaccgattatcgattctctgtcagaagaggaacggaatcagattgaaatggtcattacctgtacggaatccgggattgattttggcaaatccatcagtacatatgtccatgattatttgcagctgaagcggaattgccggttatttgaggtgaagcaggcttgctattctttaacggccgggtttcaaatgggcgtgaatttcatcttgtcgcaaacatcgccgggagcgaaagcgctcatcatcggaacggatatttcccgctttttagtggctgaaggcggtgacgcgttgacggaggaatggtcctatgccgaaccgagtgcgggggcgggagctgtcgcgcttttagtcagcagcactcctcatgtctttttgcttgatcaaggtgcaagcgggtattacgggtatgaagtcatggatacctgccgcccgattccggatagtgaagcgggggatgctgatctgtcgctcatgtcttatttggattgctgtgaaaattcatttcaggaataccgaaagcgtgtgagcggggcggattataagaatacatttcaatacctttcttttcatactccgtttggcggaatggtaaaaggagcgcatcggacgatgatgagaaaattggcaaaggctaagccgcaggacattgaagcggattttcagcaacgcgtgctgcctgggattcaatactgtcagcgcgtcggcaacatcatgggggccaccgtatttttatctcttgccagcacgattgataacggctcttttgaaacgccgaaacgcgtcggctgtttttcatacggttcgggctgctgctctgaattttacagcggtgtcgttatgccgcaaagccgtgcgcggcagaatcaatttcagatcagccggcatttggatggacgcgtccgtttatcgatgactgattatgaccggctgctccaagacagcggcatcgtaaaattcggcacaagaaatgccgcgcccgcagcagacatcccgaatgcgcatcaaggaaaaacgcgattagtgctgactgaaataaaagagtttcacagaaagtatgaatggacgacctagtataagagccggaaaggcttgagtatttttaaagaaacggagaatacacatgaatccaatgattgatgtacaggaaacagaaccgggcattgtgcaggtcacaatgcaggatacggccgggaaaaacgggctgtcagaagagtttgtaagagagctgcaccgggtattccaagacatcaatgcccatccgtcctataaaactgtccttctgacgggttacggaaattatttctgcacgggaggaacgcaggaggggcttttgaccattcagagcggaaagcttcaatttacagatttaaagcttcacagtcttttattggattgcaggatccctgtgatttccgtcatgcaggggcatgccatcggagctggctttacgatcggtctgagctcggatttcgtcattttaagcagagagagtttttattcttgtaattatatgaagtacggatttacaccgggaatgggcgcgacgtatattgtgcctgaaaaactgggaattgtcctcggggaagaaatgctgtttacggccgcgaatttcagcggcgccgctctggaaaaacggggtgttccgtttgaagtgctgccgaaaaaagacgcccttcaaagaggccgcgaattggcccggctgctggcggataaaccgagagcctcactggttgcgctgaaaaccaatgtgaccgcacggatcaaaagagagctgacaaaagcggttgaggaagaggtaaacatgcacgaagccacattccatcttcctgaagtaaaagagagaatcagccgcttatacggcagttaaacagaatgaaaaaagcatgggatgcccccatgctttatgactggtccgtcttttgcagaacggagcctgcgaattgttctttaatttcggcgctccgggctgcggtttctgcgatgcagtgcatgatggcttcttcaaagcggcgctcgtctaatgcgcgaaggcctgcttcagtcgtgccgcccgggcttgtgatttccttacgcaggcgttcaggccgtttgctgcttgttctgagcatttccgtcgccccggccatggtttgtaaaatcagctcttttgccgtttcttccggcaggccggcttgaagggcggccttttccatcgcttccacataccggtacacataggcgggaccgcttccggcaatggctgtgacggcatcaaggtgtttttcttcaaagagcgtcgcttctccgattgtttccagaagctcttttgccgtccggatttcagcttcactcgcctcggagcttgcggaaaaaccggtcgccgattgctgaatggccgcggatgtattcggcatcgcccggatgatggtgagctttctgccgaaatattgctgaatcgtgtgaatcgtcagccccgcgatgacagaaatcacaagctgatctttcacgtattcgcgaatgttctcaatgctttctgccgcatctttcggtttaaaggcgagaacaataatgtcggtattgctgaaaaactcttctttatcccggcacggtttcactccgtacgttttttggagctcttcaagccggctgtcatttgaccggtttgtcatatatatatgtccgggggctgtcattccgctttgcagcagtccgttcaccattgcttccgccattgatccggccccgataaaaccgattttcttcatataaatcctccttcttctaaaacacaaaaaaaccttcccgtcaaaaaggacgaaaaggtttcgcggtaccaccttacattagcacgaatcagccgtgctcagctcaaatcccgtaacgagggatacgtttaggttttcctaaccgctctgagggcaggttctgtaaacaagagggccgcaatgtctttcagccggggacattgctctctgctgccgttgtttatatactagttcctcgtcatcgcgttccgtgttttctagtttgttgttcattatgctatgcgaaagagcgggatgtcaatctttttttccgatatgcgcaataatgacacagtgaaaagaaaacgctaaaatatgattattcaggaatgaaaagaacgaaggagcgtaaacatggcagcgagaaagatcattccgatacgtgtgccgactccgtttgcagtcggcgacgttatcgtttatttaataaaagatgaagccttaacccttattgactgcggcccgaatacaaaggaagcggctgaatcgctctcatttcagcttaaggaacacggcgtttctgcggcggatatagaacaggtggtgctcactcatcatcacgcagatcattcaggtctgctgcaccttttttccgaggatacggaagtgatcgggcatccgctgaatgacaggtacattactcaggatcagtcgtatatcgcccggcaggaggacttttttctgtcgcttatgactgaaatgggcgttcccctgacgcctgaagacatacagaaaacagttaagctgtcgtacttattttctgcaaaccgtctgttaacgaaaacagtggaagaaggcgggaaaatcgacgggcttaacggctggacggtgctcgaaatcccgggtcatgccgcttctcacattgcgctctaccatgaaaaaagcggtgaaatgttcagcggcgatctgcttttgtccaacagctccaccaatccgattctggaagctccggaaaaggggggcgtgcgcgcggccccgatgctcgactacttgaactcaatgaagcggctgtatgacgtaaacccgtcccttttatatccgggacacggcgatctgctgacggacgtaaagcctgcttttgacaggcggcttgaaaaacagagaaaccggtcggaatatgtgctgcgcctgttgtcagaggaaacgctgacggctttccaggtatgccggcggctgtttccggctgtgtatgaaaatgaattgtttttaatgatgtcagaaacgatcggccatcttgacgtactggctgcaaaaggggaggctgaatcctttcagtcgggaaatactctgatgtttaaagctgtgaaggggtgaaggaaatgggcagattaacggataagcggatttggatcaccggagcatccggcggactcggagaacggcttgcatattcctgcgcggcagaaggggctcatgtttttttatccgccaggcgggaggaccgcttgcaggaagtgaaaaaaacgattaccgcgcgcggcggacagtgtgatgtcattccgtttgacgtccggcatgcagaagaggctgaaaacgtaaggcgtttgatcggtcatgttgacgtattaatcaacaacgccggcttcggtatttttgaaacagccgctgattcatctttggaggatatgaaggcaatgtttgaagtgaacgtcttcggattaatcgcctgtacgaaggcctgtcttccggtgatgcttcatgcgaaaagcggccatattatcaatatcgcctcacaggccggcaaattggcgacgccgaaatcaagcctttattccgctacgaaacacgccgttttagggtattccaatgcgctgcggcttgagctggccggtacgggtgtagccgtgacaacggttaatcccggtccgatcaaaacagacttctttacaattgcagataaagagggcggttatgtgaaaagcgtcggcagatggatgcttgatgccgaccatgtggcagagcgtattacatccgtaattctgacggataaacgggaaatgaatcttccgcgatggatgagcctcgggacgaagctgtatcagcttttcccttcgtttacagaaaaactggccggccgcgcattaaagaaaaagtaacaagggggagaaaggaatgtccgacctggatatacacaaggcattgatgacagagcctttagtcaggcaaatggcagaggcgcgtgaagtattttggatcaacccgcataaaaccgatgatccagtaaagaatggcgctgaatggagaaaggagattgccgaagcggaagaaaggctgcgccggtttgcgccttatatcgcgtcggcttttccggagacggaagcggcgggaggcctcattgagtctccgcttgtcttcatcaatgaaatgaaaaagcgtctggaacaaagcgccgctcaggctttccccgggcgtctgcttttgaaatgcgacaatgaacttccgatttccggttctattaaagcgcgcggcgggatttatgaagtgctgaagcatgctgaagatctcgctttaaaagcgggaatgctctcaacagacgatgattacagcatattgactgaggaacggtttaccgcttttttctcaaaatactctatagccgtcggttctacgggcaatttaggtctgagtatcggcataatcggcgcgaagctcggcttttgtgtgaccgttcatatgtccagtgacgcaaagcagtggaaaaaggagctgctccgggaaaagggggttcgcgtcatcgaatatgaagcagactacagtctggctgtcaaagaggggcgcatgcaggcgaagcaggacccttattgttattttattgatgatgagcattcccgggatctgtttctggggtatgccgttgcgggaagccgtgtgaaaaagcagctcgatcaaatgaacataaagccgggtgcagatgaaccgcttttcgtttatttgccgtgcggggtcggaggaggcccgggcggcgtcgcgcttgcgctaaagctgatctatggcgggcatgtccatatttttttcggtgagccgacgcattcaccctgtatgctgttaggactgttttccggcttgcatgacggaatcagcgtgcaggatatcggccttgataatcaaacagccgccgacggacttgcggtaggaaggccgtccggactggccggccctctgatggagcctgtactcagcggctgttataccgctgatgacggcacgcttttttcactgctttatcaattaagagcggccgagaataagagccttgaaccctctgcactcgccggtatggccggagccgtcaagttcgttcagaccgaagccggtaaccgttatataaaagagcgggggcttgagatggaaaatgccgtgcaccttgtgtggggtaccggcggaagcatggttcccaaggaggaaatggaagagtacagccggatcggttcctcatttgtgaaaaaaatgggcagacagtgaggcggttttccgttacaatctttgtaagcgtttgttttttaatcggaaagccatacagagagattggtgtgaattgtgaaaagtaaagaattgaacttacatacattgtatacgcagcacagccgcgagtcgtgggccggattcggcggccatctttccattgccgtttcggaggaagaagccaaggccgtagaggggctgaatgactacctgtcggtggaagaagtagaaacgatttatattccgcttgtgcgactgctccatcttcatgtcacgtctgccgcaagacggaatcagcatgtcaacgtgtttctgaaacatccgcattcagcgaaaatcccgtttatcatcggaatcgcgggcagcgtcgccgtcggcaaaagcacgacggcgagaattttgcaaaagcttctttcccgtctgccggacaggccgaaggtgagcctggtgacaaccgacggtttcttgtatccgacggcggaattaaaaaagaaaaaccttctgtccagaaagggatttccggaaagttacgacgtgaaagcgctgcttgagtttctgaacgatataaagtcagggaaagagagagtggaggcgcccgtatactcccaccttacctatgacagggaagagggtgccgtcgaggttgtcgaaggtgcggatatcgttattatcgaaggaatcaatgtcctgcagtcgccgaccttagaggacgacagggaagatccgcggatttttgtatcggatttctttgatttttcgatctatgtggatgccgaagaaagccggattttcacgtggtatttggagcgtttccgcctcttaagagaaaccgcttttcaagatccggcttcttattttcataaatttaaggatttgtctgatgcagaagcggataccatggccgcctccatctgggagagcgtcaaccgtccgaatctgtatgaaaatatcctgccgacaaaattcagatcggatttgattttgaggaaaggtgacggccataaagttgaagaggtgctggtaaggcgggtgtgatgtgaggaggaagcgaatattatgatgcatcatattgaattgtatgtatctgacttgaaagcctccgcccggttttggggatggtttttaggtgagctcggttatagggagtttcaaaattgggactccggcatcagctggaaaaacgccggattttatgttgtgcttgtacagacagaggagcgttttttaacaccggagtaccacagatgccgggtcgggctgaaccatctggcttttcatgctgcgtcaagagagcaggttgacgggatgacggaaaagctgcttgccagaggatgccccgtgctttacagggaccgccatccatatgcaggcggaagcacgcattacgccgtatacacggaggacccggatcggataaaggtggagctggctgcgcctgcttctgaatgaactataacttctcgtttttttcttcgcgcagcgcgtcgagtttcttttcgattctgtccaattgtatgcggcgctgcttcaagcttctgaatacgtatatcacggcaaacaggaaaaatgcggctgcaataaatgagatcaattgaaaaatgacatcaccgatgttcatcttttttacctccgtgtgcggcgggcttcttcagcccgccgttttttcattttaaccgatgtgaagacatgggggatgaatcatttctctcctagctttgtttctttctgagaatgaatagtttctgcatatggcttatgatcacttttgcggccgcatatcccggaatggccagcagcatcccggcaattcctgagaatttgccggcggcaagcagaagaaaaataatggtcagcgggtgaatgtccagcttccgtcccataatttgcggggaaatcagctggctttcaagctgctggacaatgacgacgaccgtaatcaccagcaccgcctcggtcggtgaatcgaacaatccgacaatgactccgggaaatgtgccgatccaaggcccgataaacggaatcagatttgtcaccatggcgaacgcgcccagaacgagcggataatcgagcccgatgataaaatagccgattgtgacgagaacgccgacacagaaactgacgagcagctgtccttgtatgtatgaactgagagcttcatccatatcccgcaggatttgttttccttctttttgatgtttttccggaagaagccgcagcagtcgccggggggctttatttccttcttttaacatgtaatacagcgcaaacggaataatggctgcggtgatggcggcattggcagccgtaccggccagactgctgagagaatcagcgattgaaccggaataatttgcggctttgtccgctaattttttaaaggaatccccatgctgaagcctggaaaaccatttgctgtcctgaagatgcccgatccaattttcagcttttgcggaaagctccggaatatggtctgtgaaggctgtaaactgtttttgaacggcagggcccgccgtataaaggaagaggacaaaaaggccggctgttcccgcataaatcgctaaaatcgcgattccttggggcagctttaatttcgcatgcagcactctgacgagcgggcggcacaaatagtaaaggacacccgataatacaatgggcggaaacaaggttttaaccgtaatcacaacaggctggaacaaaaagtctattaatgttccgagataaatgatgagaaataacagaagaacggcatagccgatcttgaaataaggcccgacaggcatatcctgcaccacgcaatctttagggtttactctcggacgtttcccttttcgcccggtgcataaacgtccgtgtcaggaaaactgcccctgattggtgacgtaatcgtagataatatcttctacatgggcatggagatcctcatcgggttcttcattccttctttcttctaaagctttttttaaactctgtttttcataggggctcagcggatctgtcgacacattccgtccatactggcggagggcttgtcccagcattttttctataaattgatccatcatatattctcctattcttgtcattcatctttattctactaaatatcatgtgatcctcccactcttctatcatattttctgtcaggacgatttaggcttttattccagttcagccgagagaataagatgaaacggcagcgttaacgcatcttcatcgtttatgatttttaaacgtttttcgtcatgcctcacttgtttcacccatccccaaaagcggcgggggccgcgtgctgaagcataggtgaccgagatggctctgtcttcttcaatcgacgccgcaatgatgcggttcatgtcgttcagttgctctgcgctcagttccggaggccggaattcccgttcttttcgtttttttgcaagcagctgctcccgatgttcgggcagcatcatccggcttgattcccacatgacattatacccgggtgttaatttgttcggattcatgtatatcacctcaattatttgtaatgcccgccgattttttcagcccggtgaaaggcttggccggcctctgtcagcgaagcggcatggaggagcgacgcagggccgtaccgctcatgaatatcatccaatactttgccgagactgatctttttttcctgagcatcaaacaggctcagctgaacataatcacagggctccagctgggaaagggagacgccggcgctgcggacgggctcaccgttccaatgctctttgaagagcttgaccgccgctttaaaaatatccattccgaaattagtcggagagaccagctttctctgtctgtgaaaacctgaagggaattcaaaatcagcgcctctgatgctgaccgaaaccgtatggccgatgtattgtttgaaacgggcgcggcgggccacttcttcgcttaactccaacagcacgactttgatatcctcaaagcggctgtagtctctcgggagggtcatgttatggccgatcgctttttgccggctgtgcgtgttgacggtgaccggagagggatcgatgccgcgggctgtccgctgaagcaattcgccgttaatgccccagcgttttttcagcagttcggcggggtgcccggcaagcccgccgattgtgctgatgcccatccgtcttaaatgatgctccatccgttttccgatgccgaataattttccgaccggcagcggccacagatcctccctgatatttgacatatccaatctgtggatgccggatgcgttttttttggcaaaatggtcgcaagccattttcgcgagcgccttattcggcccgatgccgacacgggcataaattccgaattcacgcataatcgcttgctgaatgctttcggcaattgtaaaaggatcaccgaacagccgcctgcttccggtcacgtcgagaaactgctcatcgatggagtagggttctacaagatcggtataccgttcaaacagttcggtaatcatgacggatacatcaatatactgctgcatccgcggacggacaataacggcgtcgggacatttggcctgcgcttcccacagccgttcggcattttttacgccgtatcgtttggcgagcggacaagccgcaagcacgacgccgctgcgtctttcgggatctcccgagacaatcacgggccggcttttgagatgaggcgcttccgctttttccacagacgcataaaacgattgcatatcaacaagaagaatatcagccataaaaaaacctccgggaacgtttgttctgtttttcattgtacccgaacaatgatcacgtttatactggtaaatcattccccggctggaagacgtgctgattcgtttgcttgaaaagaaatcatttacaattgcaaacaacccacatataattttttatattccaatgagaagagctgacattcattttgccggacgaaaaggagagtcaatcgataatggatattcgaacaattacctctgaagactatgaaatggttacgtctgttttgaatgaatggtggggcggcaggcagatgaaagacaaactgccgcgcttgttttttgaacattttcaggacacgagctttatcacgtacgggccggagggaatgaccggttttttaatcggttttcagtcacaatcagaccctgagacagcctacattcatttttccggtgtgcatccggatttcagaaaaatgcaaattggaaaacagctctacgatcgatttatggagacggtgaaaaaaaggggctgcacaaaagtcaattgcgtgacggcgcccgtgaataaagtatcaatcgcttatcatacaaaattaggctttgaagttgaaaaaggaaccaaaaccgtaaacggaatccctgtttttgcgaattatgacggtccgggagaagacagaattctgtttgtgaaatatatgtagagggggatgaatatgggttttttagctgacacgcccaaaccgccctattatgcggtcattttttcatcaataaagggaaaatatgatgaggaatatgagcatacggcagagcgcatgatgaatttggcaggcggacagccgggctttttaggcgcggaaagcgttcgggaggaaaacggctgcggcatcacggtttcctactgggacagcctggaggcgattaaaaggtggaaagaccatactgaccaccgggcggcaaaacaaaaaggaaaaagcgcctggtatgaagcgtacgcggtccgcattacgaagacggagtcacagcggatgtttgcgtcaaaaggggcggaagattgattacatttttacggcatacacaagaacagacggcgcgggaaattgcggcggttcaacgctgctcttatcaaaaagaagccgagctgatcggctttttcggcattccagccctgcatgaaacacccggtgacatacagcggtcacgggagacgtttgccggtttcagagaaaaagatcggcttgcaggcgtcatttcgtatgaaaaaaaaggatatgaccttgtcatatgcaggctgacggtgcacccgtccggctttcggaaaggaatcggacgggcgcttattcaatttgtgatcgaccaaaaccgggacgcccaaaaaatagaggcggctaccgccagtcaaaacgttccggcagtctctctctatttaaaaaccggcttcacagaagccggacagacagagacgccggaagggctgaccctctcgttttttcatctttatccgaagaggaaagcggaagttgttccgtacaagccggaatggaaagagatgtttgaaagagagaaggcggacttgatccgaatcttcggccccgcacttcattctgtcagccatatcggcagcacctccatcccgggaatggccgcaaaacccgttatcgatatactggcggaggtcaaagatatttcagatgctgaccgattcagcccgcagctggaagcactcggctatgaggcgcaaggggaaaacgggatagagggccggcgtttctttcaaaaaggcggcagcaagcgcacacaccacgtccacatatacgaaacaggccatccggatgtgaagcgccatctgctgttccgggattacctcactgaaaagcctgaaaaagcggctcaatacatggaactgaaacggcggctcgctaaggcatacccgtacgatacggcaaagtatagtgaagggaaaaatgactggatcaaggcggctgaacaagaggcaaaggactgggagagcgggcttctgtaaagaaagcagaaacaatgcatacagcggctcggtatgctacaatggcgaaaatgaaaaacggaggatcatctatgcaaatacatgtgacggatgcggcgaaacacacacttcagcaggcgatggacgccaacccggggaaaaaagcgcagctccgctatgacgcagaaggctgcgggtgcgcggtgagcggcgtgccgaccatctggctggcggacgaattaacgggacaatgcgaagccattgaaaccaacggacttccgctttacatccagacctcacaaaaagtgttttttgacgaggaaatgacaatcgattacaatgaaaaggcaaaaacgctcgtcttaaaaagcccggcagagatgctgagcccgagaatgagcatattagtaaagcagggagaaacggaaagtgaatcaaaagctgaaagccattaaacagacggcacagcataaaacgtgggtatcctttctgaacaacaaccacccgtacagtctgctgcactggtccatcggaggcgctgaatccgttcagaaggatgtctggctgcttcaggatgagatgaccttcaaagcgcaggagtttacgacaatcgacctcgccattgactggatcggagaaaatatggacgggattaccgacgttttatgacgggaaagcgaaagaaccagcatacgttctttcgcttttttacgtttgcgtcatggtatctaaaaaggtttgaacggctttgcggtagctctccggatttttggtgtacgacatggcatgcccgcccgattcggccagatagagcatcttcggtccgcgttttctgcggtgcagcaattcggaagaagcgggaggtatataatcatcttccttactgtgaataaacagcacgggctgccggtcggctgataaccgatagaggcgatacatcacggatacggtatccttctctcatccgcaaaaagaaatcagccaaaggcagaagcggccacggaggcagccggaactcccgcttcagtctgtaggcgagctgatcgcgaaagcttgcgaacggacagtccgcaatataaaaatcagcgcctttttcatcctgatgcccgcccgcgtataataaggccgtcaccgctcccatcgattccccgtggatgccgatttgaccgccgtctcccgttttgtgtctcacccaattcacggcttcttccaaatcatctttttcaaaatagccgtagctcgtcgttctgccgccgctttttccgtgcccgcggtggtcatatacgagcacattccagcctgaatctaaaaataaatccatgtatttcaatgaattgaacgaatttacggtaacgccgtgacaaataatcatggcgtttgccgtatgatgcggggcgacgtaaaagcctttgatctcatacccgtggcgtgacaggatgacggcctcttctttttccatggcctgaaaggaatcaaatctatcatgcccgtccgccgtttcttttttcatgatatcttcatccgtctttttcttcataaacataatgagattcgtaaaagcgaatccggcagccaaaaagactgcgcaagccgaaccgaacaccgccagccattttttcacacaggggccctcctttcatatgaaaaatccttcctccggcttttcaggaccgtgaacgttgccggcctccggcgctccgtggtacacttgcttcaccatattcagatacggggggcgtaatgatgaaaaagcagctgcctaaagaaaaacacagcttaaaagacgatctggaggaagatctgaaggccaggcttttgcaaatgaaaagtgagctgaaggaagaagacgagaaaaaacaggcgcagcaaaaagcggaacaaatcagaaagcgaaaagaaaaagaaaaacataaaagctttgaagagctgctgaatgaaagcagtctcgattggcacaaatataaataaaccggcatctgacaaggtgccggttttattgtttaagaacgatgggcttcgtatacgtcccgttttgtatggtattgcagggctttgatttcctggctgcttaaacgccgggcctctgcagccgaacagttttctctcagctgctcaagtgagctggctccggtgatgacagaagcgacggccggctgtgacagtaagtattgaagggaaagctccgtcatgctcaagtcaggtgcggcagcgccgatcgcttttttggtttcttccaattctgcaaaagaatatgttaaatacccgttctcttttacgcttgcggctgcttgatcaagcggtttttccgtaagaagccctttagcgacaggccctctggcgactacgctgattccgttctcctctaaaaggggaagccactcctcaggacgccggtccagcaggctgtattgcatcataacgcttgagatatttgattttttcacatattctttaatgacattcggacgaatcgaggaaatgccgtaataccggatgacgccttcctgttttaagtcctcaaacgcttcgatcgtttcgtcaatatgatcttccatcgtgccgccatgcagctgataaaggtcgatatagtccgttttcagccggcgcagactgtttttgaccgcttcttttatgtatcctttggaggcgtcccaatgccagccgtctttatcatcattccagcggtttccggctttcgtggctaaaatgatgtcgtgcctgcggtttttgacggcctccccgacaatttcctcatttctgccgaaatcataaagatcagcggtatctaaataattgattccaagctcgatcgcttcatccaaaatagacagcgcttcagctttatccgtgcccagcgacatacagccgagcccgatttcgcttatttctaaatcagaatgtcccagtgtgcgttttctcatcgtttcgctcctttttatagtcttttattgaccgtaatataaaggcgcgaagttttcaactgttaaggcccggtgatccaatctccgacatagcggaatgtccgtccgtattctttcagtttagcccgcacttcccacgcctttccgaccaatacgatacttttatccttccggtacaccttcaatcgaaaagcacctccctctcatgcatgtatgataaaatatatgaggcataatagagagacagaacgggagatgacatgatgaaacatttagaagaaaaaacacttgcgaaaaaaaagctgtatgacgggaaagtcatagatctttacttagaggatgtagagctcccgaacggaaaaacaagcaagcgggaaatcgtcaaacatccgggagcggtggccgtacttgcggtgaccgaagaaggaaaaatcattttggtaaaccagttcagaaagccgctggaacggacaatcgttgaaattccggccgggaagcttgaaaagggggaagagccggaacatacggcgttaagagagctcgaggaagaaacgggatatacggcggaaaccttgacgaaaatcaccgctttttatacatcacccgggtttgctgatgaaatcgtgcatctctttcttgcggaagggctttcgccgctggaagaaaagcgcgaactggatgaggatgaatttgtcgaagtcatgcaggtcacgcttgaagaggccgtgaagctgattgaatcccgcagggtgtatgacgcaaaaacggcgtacgcgattcagtatctgcagctgaaagaagcactgaaggaaaaatgatgaaaaccatctatgcggatctgcatattcatatcggccgcacctatacgggaaaaccggtcaaaatcaccggggccaaaacgttgacgctgcatcggattttagaagaggccagtgaggggaagggaattgaactattgggcatcatcgactgccattccccggaagtcatagaagaaatcgagcgcggaattgatgaaggcagataccgtgagctgaaagaaggcggcatccggtatcggaatacgacgcttctgttgggcagtgagcttgaaatctatgatcacacatgccgcgggccgattcacgttctcgtctttatgccgtctcttgccgaaatgaagatgttttctgagtggctcgcaaaaaggcttaaaaatatccatctcagttcccagcgtatttatgaaaccggtttgaatcttcaaaggaaaacaaaggaattgggcgggctgtttattcccgcccatatgttcaccccgcataaaagcctgtacggaaaaggggtcatatcttctttgacagaagttttcgacccggcgctcattgatgcggcggaactcggattaagctgcgacaccgacatggcttcgcgggtaacggaacttgatccgtatacatttttaacaaattctgatgcgcattccttaggaaaaatcggcagagaatataatgaaatgcttcttaaagaagcgaatttcacggaattttcgctggctttaaaagggaaggacggaagaaaaatcacggcgaattacgggctgaacccgaagctcgggaagtattaccggacggcttgcgaccgctgcggcagcccggttgaaaaaggagcttccgcctgtccggagtgcggggggaaaactatgacaaaaggggtcagtgaacggctggaggaactgagcggcccgaaaaaaagccgcgtgccgcggccgccgtatattcatcaaatcccgctgcagttcattccgggggtcgggccgaaaacgttagacaaactgaagcgggctttcgggacggagatggcgattcttcatcaggcgcaagaagaggaattggcgcatgtcgtccagcctaaaatagcggctgtcattcataaagcgcgcaccgggcagctcgtccttgaggccgggggcggagggacgtacggcagaatcaagtcgtaaaagccggattttagcggagctcctcctgcaccttctttttcgtgcggacaaacgcaatcaattcgatgatttcatcctgattcagcggctgtccgtcaacggtcagtgtgccgcggccttgtgcggcgtttgttaattcgatggtctgggtaaacggctccgcctttttttcagtgcgccccagtaaatcgtcgcacgtcgtgtcaaacagatcggcaagcgtgcccagcgcttcgaatgacggacgccggtatcctgattcatacccggcgtacgtgcttttggcgatgccgagacggtcagccgtatattgaagagaccaatttttcttttttctcagttcagttaaacgatctaaattcatattcaaaaccgctccttttcacttgagcaaattatatcatatcgatatgcaaaagtgtacgcgaattgaataataatcacttgattaatttcaatcgtctgtctataatttgattaaaagtatgcgaaaagcgaatgcttaacacatcttgagaaatggatgaagaggtgcagggtatgaaaaaattattgctgttaacaaccggaggaacaatcgcctcagtcgaaggagaaaacgggcttgcacccggggtgaaagcagacgaattgttaacctacgtatcaaaacttgataacgattacacgatggaaacccattcgttaatgaacatcgacagcacaaatatgcagcctgaatactgggccgaaatcgcaaatgctgtcaaagaaaaatatgacgcatatgacgggttcgtcattacgcacgggacagacacaatggcgtatacatcagcggcactgtcttatatgcttcagcatgctgataaaccgatcgtcattacgggttcgcaaattccgattacatttcaaaaaaccgatgccaaaaaaaatatcacggacgcgatccgcttcgcatgtgaaggggtgggcggcgtatacgtcgtatttgacggcagagtcattcaaggcacacgcgccattaaattaagaacgaaaagctatgatgcatttgagagcattaactatccgtatatcgcgtttattaccgaaaacggaattgaatacaacaaacaagtgcacatgccaaaagacgatgcctttacggtcaatacctcactttgcacggacgtgtgcctgctcaagctccacccggggctgaaaccggaaatgtttgacgcattaaagggcatgtacaaagggatcgtcattgaaagctacggcagcggcggcgtgccgtttgaaggaagagacattctcgccaaagtcaatgaaatgattgaaagcggcattgtcgtcgtcattacgacacaatgtcttgaagaaggagaggacatgagcgtctatgaagtcggccgaagagtcaatcaagatctcattatccgctccagaaatatgaacacggaagccatcgtgccgaaattaatgtgggcgctcggccagtctcacaacttggctgaagtcaaaaacattatggagacaccgatcgcagacgacgttgtactgtaaaaacatgactaccacaaagagaaagtagggttttagcatgacaaacgcgcaaaaagaatatcgtcaggaaaaagatttcctcggagaaaaacaaattgaagctgatgtgtattacggaatacaaacgctgcgcgcgaaagaaaactttccgattaccggctaccgcatccacgaagagatgattaatgcgctcgccatcgtcaaaaaagcggcggcgcttgccaacatggatgtaaaacggctgtatgaaggaatcggaaatgcgattgtccaggccgcagacgagattcttgaggggaaatggcatgaccaattcatcgtcgatccgatccaagggggagccggaacgtccatgaacatgaatgccaacgaagtaatcggcaacagggcccttgaaatcatgggccataaaaaaggtgaatacattcacctcagcccgaacacacacgtcaacatgtcccaatcgacgaacgacgtgttcccgacggcaatccatatttccaccttaaaacttttggataagctccttgatacgatggcgcatatgctgagtgtctttaaggataaagcgaaacaatttgattctgtcattaaaatggggcgcacacaccttcaggacgctgtgccgatccgtctcggacaggaatttgaagcatacagccgcgtgctcgagcgtgacataaagcgaattaaacaatcccgccagcatctgtatgaagtcaacatgggggcaacggccgtagggacggggcttaatgccgatccgcgctacatagaacaggttgtaaagcacctggctgacatcagcggactgccgcttgtcggcgccggccatttggttgacgccacacaaaacactgatgcgtatacggaagtttcagccgcgttgaaagtatgcatgatgaacatgtctaaaatcgccaacgatctgcgcttaatggcttcaggtccgcgcgcgggacttgcggaaatttcactgcccgcccgtcagccgggatcatccattatgcctgggaaagtcaaccctgtaatggcagagctgatcaaccaaatcgccttccaggtcatcgggaatgacaatacgatctgcctcgcttcagaagcgggccagctggagcttaacgtaatggagccggtactcgtatttaacctgcttcaatccatcagcatcatgaataacgggttccgttcatttaccgatcattgtctggcgggaattgaagccaacgaaaaacgtctgaagcaatacgtggaaaaaagcgtcggcgtcattacagcggtcaatccgcacctcggctatgaagcggctgcgcgaattgcccgtgaagccatcatgacggggcaatctgtaagagatctttgccttcaaaatgatgtactgacagaagaagaattggatatcattttgaatccgtatgaaatgacaaaaccggggattgccggaaaagatctattagaaaaataaattttaaagcaacaacagccgccttttcacgtttttcagtgaataggcggttgccatacaaagggatgaggcagtatagtataatttgttatatcatttgatgaaagcgttttagcttttttcttctagggggattttcttgtgaaagaggtcagattgccaaatttattggaaattattatcttattattcgggtttttagcacttgtcttatcgttcacagtgtttttagacctgccgatccagctagctctattaatatcctggtttttcgctattattctcggagtcaggctgggatattcatataaagacttgcaggattcgattgtcaccgggatatcaaacggtcttgaagcggtgttgattctcgtttcggtcggtgcgctcatcgggacatggattgccggcggtgttgtgccgacgttaatttattatggtttagagtttattaatcctcatattttccttctggctacactggttatttgttccgttatgtccgttgcgaccggaacatcgtggggaaccgtgggaaccgcggggatcgccatgattgccatcggagagggaatgggtataccgcttccgatcgtagcgggagccgttttgtccggcgcttacttcggagacaagctttcaccgctgtctgacagtacggtgcttgcctccacgctttctaaggtggatgtgctgtcgcacgtcagagcgatgatgtatctgtcaattccgtcctatattattacggccattctatttaccgtaacgggatttatatacggcggaaaaaatattgatctcgacaaagtggaatttttaaaatcttcattgcagaaaacgtttgatattcatatatggatgctcattccggctgttgtcgtcgttgtccttctgattttgaaaaagccgtctatgcccgttattatcatcggtgctttgcttggcgcaatctgggcttccgtctttcagggaatgaattttgccagtgccatcgcgactgcttataatggtttttctattaaaacggacgtcgaatttttaaacggcctgttaaaccgcggaggcattaccggtatgctggatacgttagtcgttatcctgttcggtctcggttttggaggaattcttgagaagctcggcgtattaaaagtgattgtctcaacttttgagaaaaagctgaccacaccgggaaatgtgacgctttcgacattgatcgtcgcccttttaggaaacattttcggctgtgcgatgtacgtgtcattgatcctgacgccgaaaatcatggagaacagttatgataaactgaaacttgacagaagagttttatcccggaacgcagaggtgggcggaacgcttacttcagggatggtgccgtggtctgataacggcatctatatggccggcattctcggcgtatccacattttcatatctgccgttcatgtggctcagttttgtatctatcggactggcaatattgtacggatacacggggaaattcatttggtacacgaaagaaaaatccttgcaatctcaaaaattgggttaggaggttcatttcatgattacaaagcatatgattcggacgttaatgattgaaacgccgactgttcccggaaatctcggaaaagtggcaaccgccatcggagtgatgggcggagatatcggggaagttgaaaccgttaaagtcggcccgaactacacaatgcgcaacatcacggtgcaggccgaaaatgaggagcagctgcaggaaatcattcaagccattgaagctctcggtgaaggcatccggcttcatacagtctcagatgaagtgctctctgctcatgaaggcggcaaaattcaaatgaaaagcaaaatgccgatccggacattggctgagcttggccgtgtttatacaccgggcgtcgccgatgtgtgccgactgattgaaaacgagcctgaaaaagcgtccatctatacgacaatcagcaattctgtcgccattgtcaccgacggcacggcgattctcggcctcggcaatatcggttctgtcgccggaatgcctgtaatggaagggaaagccgcgctttttgaccagctggcgggtatcagcggaattccgattttgcttgatacctctgatccggaagaaattattcgcacggtaaaacatatttctccggggttcagcggaatactgcttgaagatatcggttcgcctcactgctttgacattgaagaccgcctgaaagaagaactggatattccggttatgcacgatgatcagcacggcacggcggtcgtcacgctcgccgccgccatttccgcttgtaaaagcgccggtcttgatttaaaagaagcgaaggtcggacagatcggtctcggcgcggcaggcgtcgccatctgccggatgtttatggcatacggagtcaaagcggtctgcggaacggacaagtcagaagacgcaatgaaccgcctcgctcagtacggaggtcagccgcttggaagcatcaaagatttaatggacacgtgtgacattgtgatcagcaccaccggagttccgggtctcattaaaaaagaggatgtcagaaaaggacatgtcattctggccttatctaatccgaagccggagattgaaccggaagacgcattacaagccggagccgcttatgcagccgacggccgctcggtcaataatgttctcggcttcccggggattttccgcggcgcgctgaacgccaaaagcaagaaaatcgaccatgaaatgcttgtggcggccgcagaagccatcgcctcttgcacaaaacacggcgatctcgtgcctcagcctttggatgcggacgtgcatcaggctgtatcagcagccgtagaacgggccgcggcaggaaaataaacaactcttacagtaccggacatgtgccggtgctgtttttttagatgaataggaaacggaattcttaggcaggctaacagatagcaaaagacggaataaagaggtgtcaatgtggattattttccgctgatccatacaaatatttgggatgctgtgatcggcgtgccggtcgtcttatgcgttacacagctgatcaaagtgttctgccgggttccgggcatattcgttcccacgattgcccttgctgccggaaatgttgtgtctatcgttttcggtcaccatgaacacgtgtatgcggggattttcatgggatttttttacggatacgccgctatggggagctattcatctgccaaaacgtctctgcgcgcttaccggtcgaaacatgagccgtattcatgaacacatcgggatttttttgttatgataaagaaaaggcaaaaaggagcgattggcacatggcgaagagcaaaacgaaaaaaatgcgggagcatctcagaagaaacgggatgcgtgacgcagtcttgtcaagggggacggcgccgcctttcagcacccatgaaagagtgacgaaaactaaaaaagacaggcttgaaagaataaagcataaaaaaaggaacccctatgatcaccggagtgatgacgggggttctttttttatgcccgaatctcgcgcctttctatgatttctctgtcatgttttctcttttctttcatacaatctactaaatcaagtcaatagattagcgggaggaaagcggtatgagaaaacaatcgtacaaagaactgttttttcgccatgtaaaggatcatctgtcactttatatatttgtgttcgtcttgtttttgatgggggtcattttcggggcgatcatcgtcaacagcatgaccatcacgcagaaagaagatttgtattactatttaagcaagtttttcggacagctgtctgacggaaaacatgccggcgcttcagaaatgttttggcaggccgtctttcatgatgtaaaatatttggggctgatgtggattctcggtatttccgtgatcggtcttccggttattttcattatggtgttcttaaaaggaatcgtcgtcggcttcacggtcggttttttagtgaatcaaatggggatgaacgggtttttcctgtcatttatttcggttctgccgcaaaacatcgttctcattccagcatatcttatcatggggacatgctccatcgctttttcactgaaactgatccggcagctgtttgtcaaacgcagccttcatgacgcgccgatccaatggttcggacgctacgccttcgtactgattctcatcgttttcttctcggtcctcgcttcactgctcgaagcgtacatgtctccgctgtttatggaaaagctgtcatcacgcatattttagaattattatcacaaaataatacttttatttatcagtttataataattatagttggaactctgcgcgtattttgttataatgagtcatggaatgcggcgtaggagggaaagacatggaaaaccgtattgatcgaattaaaaagcagctgcactcgtcaagctacaagcttacgccacagcgggaagcaacggtaagagtgctgcttgaaaacgaagaagaccatttaagcgcagaagatgtatacctcctcgtaaaagagaaatctcctgaaattggtctcgctacagtataccgtacattagaattattaacagaattaaaagtcgttgataaaattaacttcggggacggcgtatcccgctacgaccttcgcaaagagggcgcggctcattttcatcaccatttggtgtgcatggagtgcggagccgtcgatgaaattgaagaagatctgcttgaagacgttgaagaagtgattgaacgtgattggaaatttaaaattaaagatcatagattgacttttcacggaatctgccaccgctgccgcggggatgaaacagagtaaaagcctatgaaccttttctgccaggaaagggttttttgctgtttttatgtataaaagcctttgaaattggcataaggtgtactaacagccgccaaagaaagggtcgatcgaaagatgggcagattcctgaaaacagccgcggatacgatcaaagtgtttattctgttcacaggttttaccgcgctgttctattatgctatgatatgggtgaattcagagtatgaaaactatcatcggtacgataaaccggaaggctccgccgtcaaagtggccaaaacggaacatgaggagaaagacggctggttcggccgattgatctttttttaccaaaacggggagtagatcaagagtgaaggatcaaattaaggatttcatccattatgtgagggttgaaagagggctgtccctaaatacgatgatgtcctatgagcgtgatctgaaaagttattctctcttcttaactgaaacccttcagatcacttcatggaatgatgtgacccgtcttcatattattcaatatttaaagcatataaaggactccgggaaatccggcaagacgtctgccaggcatttggcgtcgatccggtcttttcatcaatttctgttaagggaaaaagccgcggataaagatccttcggtacatattgaaacacaaaaaacagagcggacgcttccgaaagtattggcgcttcacgaagttgagcggttattggacacgcctaagcttgacagcccgttcggtctcagggataaagccatgcttgaactgctgtacgcaaccggcatccgggtcagcgagatgatcgagctgaaattatccgacgtccatttgacgatgggatttgtccgctgcttcggaaaagggcggaaagagcggattgtgccgattggtgaagccgcttcccatgcgatagaagcatacattgaaaaagccagagggaaattattaaagaaaaacgtaaccgaagcgctttttctgaatcatcacggcaggcagatcagccgtcagggattctggaaaaacctgaaaaaaatcgcccttgaagcggggattaaaaaagagctgacaccgcacacgctccggcactcttttgcaacgcacctgctcgaaaacggcgcggatctgcgcgccgtgcaggagatgctcggacatgccgatatttccacgacacaaatttatacgcatgtgacgaaaacaaggctgaaggacgtgtacaaacagtatcatccgcgagcttaggagccgctgccagaggggccgcggctttttttgccggattggcggaatacagagaaggttctaattatttgaatcggcattgtcaacaagaatgtaaacggtttatacttgagttgtctgacctctgtaagctacaatggacagatggaagaaaaggaggcttttatgatgtctgaatacaaatataaccgggtatttttaattgtaatggattctgtcggaatcggtgaagcgccggacgccgccgattttaatgatataggcgcaaatacgctcggacatatcgcagagcacatgaacggcttacatatgccccatatggcgcagctcggtctcggactgatcggagacattaagggcgtggaaaaaacggagcaccctcttgcgtactacggaaaaatgcaggaggcgtcaaacgggaaagatacgatgacggggcactgggagattatgggcctctacattgaaaaaccgtttaaagtgttcccggaaggattcccggatgaacttcttcaggaacttgagcggcgttcaggacggaaaatcatcggaaataagccggcttcaggcacggcgattctggacgagctcggaaaagaacatatggaaacgggtgcgctgatcgtttacacatcagcagattccgtgctgcagattgcggctcacgaagatgtcgttccgctggaagagctgtacagcatctgtgaaacggccagagaactgacgcttgatccgaagtacatggtcggccggattatcgcaagaccgttcgtcggagagccgggcagcttcaaacgcacgccgaaccgtcatgattatgcgctcaaaccgttcggccgcacggtaatgaacggaatgaaagacagcggattagacgtcatttccatcggcaaaatttctgatatttatgacggagaaggcattacatcttcccgccgcacggtatctaatatggatggcatggacaaagtgattgaaacgctcggtgaagagtttacgggcctgagctttgccaacctcgttgattttgacgcgctgtacggacaccgccgcgatccggaagggtacggaaaagcgcttgaggaattcgacgcgaggcttccggaagtgtttgaaaaaatgaaagaagacgatctgcttattatcactgcggatcacggcaatgatcctgtccatcacggcacggatcacacgcgggagtatgtgccgcttcttgtttacagcaaaaagcacaaacatacagaacagctgccgcttgcggatacatttgccgatatcggcgcaactattgccgataattttaaaacggaaaagccggaatacggaaaaagctttttatcaagattacagtagggggactttttttgaaacaaaagatcgaacgtgctgctgcatttattaaagaacacgtgaaagaaacaccaaagatcggtctgattttagggtcagggctcggcgtattggccgatgaaattgaaggagctgtcaagcttacatatgaaacgatccctgattttccggtctcaacggtagaaggccatgccggccagcttgtgatgggaacgcttgaaggcgtgcaggtcatcgcgatgcagggccgctttcattactatgaaggctactcaatggatcaggtcacatttccagtccgcgtgatgaaagcgctcggcgttgaatctctcgtcgtgacgaatgcagccggcggtatcaacactgaattccgcgccggcgatctgatgattattacagaccatatcaactttacaggcaccaacccgttaatcgggccgaacgaagctgaattcggagcgagattcccggacatgtcagaagcctatgacaaagagctgtcaagcttggctgaaaaaacggccgatgagctgggcattcctgttcaaaaaggtgtgtatacagctgttacggggccgtcttacgaaacacctgctgaggttcggtttttaagaacgatggggtctgacgctgtcggcatgtcgaccgtgccggaagtcatcgtcgccaaccacgcggggatacgcgtgctcggcatctcatgcatttccaacgcggcggcgggtattcttgaccagccgttatctcatgaagaagtaatggaaatgacggaaaaagtaaaaggcggctttttgaagcttgtcaaagccgtagtcgcacgatctcaaaaataagtcagcataagtcagctgtttcttcggaagcagctgtttttttgtgccctcaacacgaaacattttccagatgaggcgtataaaaccaccggatttggaaaaaataaaaaggattatgaaatggagggctttggagatgaaacgtcttatatccactttgttgattggcattttattaacggcatcagcaccgtccgcttttgcaaagccggacggaaaacatacatcggagctcgctcatgaagccaaaagcgccgtgctgattgaacgcgatacgggaagcattctttataacaagaacagccgggagcgtctggcgccggcaagcatgacaaaaatcatgaccatgcttttaatcatggaagcgcttgacaaagggaaaataaagatgagcgataaagtcaggacgagtgaacacgccgcgtccatgggcggatcacagattttccttgaacccggagaagaaatgacggtaaaagaaatgctcaaaggaattgcgatagcttccggaaatgacgcatctgtcgcaatggcggagtatatcgccggttcagaagaggatttcgtcagccggatgaacaaaaaagcaaaagaattgggattgaaagatacctccttcaaaaacccgacaggactgcctgaaaaagaccattacagctctgcttatgacatggcgaaaatggcgaaggaattattaaagtacgataaaatcactcaatttacgggaacgtatgaggattatttaagagaaaatacagacaaaaagttctggctcgtcaatacaaaccggctgatcaaattttacccgggtgtagacggcgtgaagacgggctttacaggcgaagcgaagtattgtttaaccgccaccgctaaaaaagggaatatgagggtcattgctgtcgttttcggagccagcaccccgaaagaaagaaacgcccaagtgaccaaaatgcttgattacgccttcagccagttcaaaacacacccgctgtacaaacggaatcaaatcgtcggaacggtaaaagtgaaaaaaggaaaacagaaactgatcaagctgaccacatctgagccgatttctcttctggccaaaaagggagagaacatggacaaagtaaaaaaagaagtgaaaatcaacggcaatgtaacggctccggttaaaaaaggagaggtgctcggcagcctcgttctgaaaaaagacggaaaggtgctcgttgaaagcccggtcacggcaaaagacgacatggaaaaagcgggttttctcacttttctgaagcggacgatgggagattggacaaaatttaaataatcatggcgaacgggcactagttttgtcatagtgaaggaattgctttcccgaaaatcgaaacactcattatccgatcatacaaggaggaatgagcatgagccttggaattgactttcatgtcaaagaatccgtgctttgtattcgattaacaggtgaactcgaccatcatacggcagaatcattaaaacaaaaggttactgaatcgctggaggctgacagcatccgtcacattgtgctgaaccttgaagatcttaccttcatggacagctccggcctcggcgtgattttagggcgttataaacaaattaaacagctcggcggagaaatggtcgtgtgcgcgatttcgccagcggtgagacgtctgtttgacatgtccggcctgtttaaaatcatcaggttcgaacaatcggaacaaaaagcgcttttaacgttgggggtggcttcatgaaaaacgagatgcatcttgaattttcagccctcagtcagaacgaatcgtttgcgcgcgtaacggttgcttcttttatcgcgcagcttgacccgacgatggatgagctgacggaaatcaagaccgtcgtatcagaagcggtaacaaacgcaatcatccacggctatgaagaaaactgcgacggaaaggtgtacatctccgttacgctggaggatcatgtcgtctatctgaccatacgtgatgaaggcctcgggatcacggatcttgaggaagcgcgccagccgctctttacgacaaaacccgagcttgagcgctccggaatgggctttaccattatggaaaactttatggatgatgtcacgattgattcctcgccggagatgggaacgacgatacgcttaacaaaacacctatcaaaaagcaaagcgctttgtaattaaggagatttgttatggatgtggaggttaagaaaaacagcaaaaacgcgcagctcaaggaccatgaagtcaaagaattaatcaaaaagagccaagagggcgaccagcaggcaagagacctcctcatagaaaaaaacatgcgtcttgtgtggtccgtcgttcaaaggtttttaaacagaggctatgagccggacgatctgtttcagatcggctgtatcggattattaaaatccgttgataaattcgatttgtcctatgatgtccgtttttcaacttatgccgtgccgatgattatcggagaaatccagcgcttcatccgtgatgacggaaccgtcaaagtatcaagatctttaaaagagctcggcaataaaatacgccgggcgaaagatgaactgtcaaaaacatacggaagagtgccgaccgtccaggaaatcgcggatcatttagaaattgatgcggaggatgtggtgcttgcgcaggaagcggtgcgggcgccttcatccattcatgagaccgtgtatgaaaatgacggagacccgatcaccctgcttgatcagatcgccgatcattcagaagagaagtggtttgacaaaatcgccctcaaggaagcgatcagtgatttggaagaacgggaaaaactcattgtctatctgagatattataaagatcagacacagtcggaagtagccgaacggctcgggatttcccaagtccaggtatcgaggctggagaaaaaaatattaaagcagattaaagtgcagatggatcatacggaaagctgaccttttacgggccggctttttttatttgtgcatcggtggtaatttatggtcttttgcggctgatgaatgagaacaaaagtgaaccacatactacatatataaccacccgaaagatggtgatgcaagatggaaagacgaatatttctcagacttcgccaccgcgtgaaggctcataccggagatatcatcacagtcggcgacgccgcgcagattgcgggacagcaaaagctgaaaaaaaaactgtcggcactgccgctgtataaggtcacgaaaaaagacaaaaatatcgtcgtgctggacatcataaaagtgctgaaaaccattcataccgcttttcccgcgcttgatgtacaggccgtcggcggcgctgaaacgatagtggaaatccattaccagaaaaagcagctgtcagccgttttattcgtcggtgtctggctcctgctttttatcggttcatgtcttgccattatgaattttcatgaagatgtcagtatgagagaagttcatatcgccttatatgaaatcataacgggcgaacggaatgaatacccgtatctgcttcagattccatacagcatcggcctcggtctcggtatgatcgtcttttttaatcacatcttcaaaaaacgcctgaatgaagagccaagcccgctggaagtcgagatgtttaattatcagcttgatctcgatcattatgtcgcaatgcacgaaaatgaagagacgatgaaagatctgcatgatcgttagcattcttttcgttgtatttgtcgggcttggcggagggctgaccgtgggcgcgggctttgtggcttttttaaccgttatgggaatcgtcccccgccttatgcagctgacaaaaacaatgcgctttgtacaggcctacgaaggagcagttatttcaggagctgtgttcggcggctgggaaaccttaaatatgaatcatttttttttatctgaatggctggccgttccggtcgggcttttggccggcatgtttatcggcatgctggccgccgcgcttacagaagtgctgaatgtgcttcccattcttgccaaacggatcggcttcggcagcaaaatcattatattgctgatggccattgtgttcggcaaaatagccggctctttatttcattggctgtattttatccatcattcataaggaggaaccgacgtgacaaacttaaaagaaaattacaaaacaaaagtgaaagactatcagccgaaaccgccatatgtttggaattgcgtcaaagcctttctgatcggcggtttgatctgtctgatcggacaggctcttcaagacttttacatccacttttttaattttaatgaaaaaacagcgggcaacccgacggccgccactcttattttaatttccgcccttttgaccggattcggcatttatgacagactcgggcagtttgccggagcgggttcagccgtgccggtgacgggttttgcaaacagtatgacaagcgcggctctggaacacagaagtgaaggactcgtgctcggagtagcgacaaacatgtttaaattggcgggaaacgtcattgtattcggcgtcgtggcagcctatatcgtaggcctgatacggtttgcttgtgaaaaactgttttcgtaggaggagaaaaaatgaaattaaccggaaagcaaacctgggtgtttgaaaacccgttatttgtaaatgcggcggggacggcagccggaccgaaagaaaaagacggcccgctcggttcgctgtttgataagacatacgatgaaatgcattgcaatcagaaaaactgggaaatggcggaacgtcagttaatggaagatgccatcaactcagctttgcaaaaacagaatttgaaaaagagcgatattgatttgttactcgcgggggatcttttaaatcaaaatgtgaccgccaactacgtcgccagacatctgaaaattccgttcctctgtctgttcggcgcctgttcgacatcaatggaaacgattgccgtcgcatccgcgctcattgacggcggttttgcgaaccgggcgatcgcagccacgagcagccataacgcgacggcagaacggcaattccgcaatccgacggagtatggcgggcaaaaaccggataccgccacttcaacggtcacggggggcggggcggtcatcatcagccaaaacccttctgatatcaagattacaagcgcaacagtgggaaaagtaagcgacctcgggattacggacccgttcgatatgggatccgccatggcgcccgctgccgccgacacaatcaaacagcacctgcaggacttaaaccgcacggcggatgattatgatctgattttaacgggagacctttcaggcgtcggctcgccgatcgtgaaagatttgctcaaagaagaaggctatcccgccggaacgaaacacgatgactgcggtcttctcatctatacgccggaccagcaggtgtttgcgggcggaagcggctgcgcctgctccgcgcttgttacgtacacacatatttttaatcaattaaaatcaggggctctgaacagggtgctcgttgtcgcgacaggagcgcttttaagtccgacaatgatccagcagaaagaaaccattccgaccatcgcgcacggtgtggtatttgagcgggcgggaggtgcatcataaatggaatatctgttggcttttgtttgcgggggaatcatatgcattatcggtcagctgctgcttgacatttttaaactgacacccgcccatgtgatgacaacttttgtcgtcatcggcgccttgttggatgggttcggaatatatgacaaatttatcgaatttgcaggtgcgggcgcgacggttcccattgtcagcttcggtcacagcttattgcacggcgccatgcatcaagctcacgagcatggatttatcgggatcgccatggggatttttgaacttacttccgccggtatatcttcagcgattttattcgcatttcttgtagccattatttttaaaccgaaaggataatgcctgatgacgaaacggaaggtcattcttgtgacagacggggacgtatacgccgccaaaacaattgaatatgccgcggaaaaagcaggcgggcggtgtatttcccaatcaaagggcaatccgtcaaccagaagcggccccgaacttgttcagctgattaaagccgcgccgaatgacccggtgtttgtcatgtttgacgattcaggcctgcaaggggaagggccgggcgaaacggcgctgaaatatgtcgcctcacatcaggacattgaagtgctgggggtgattgcggtcgcttctaagacccatcaggctgaatggacgaaagtcgatgtctccattgaccgtgatggagaagtgacggagtatggcgtcgataaaaccggaatgagagaaatggacgagcacagaatgaacggagatacggtgtattgtctggataaattggacgttcctctcattgtgggcatcggcgacataggaaagatggggagaaaagatgacatatccaaaggctcgccgattacgatgaaggcggtcgaattcattttagaaaggagcgaaagtcatgccggaaaaaccggaaaacatgatcaaggtataccgggatcctagaaaaaatgaacaattttttaaagaccgcgtcggtatgggaacgagctatgatgtcggcgtccgcaaagttcgagtattagaccgggaagtccagatttactttgtcaacggattaaccgatactttgtttatcattcatttaatggaacagctcgtcgacgtcaataattatgatgagaatgcggatgaagcgattgacgttgttgaaaacaggcttgtcaatcagcaggtccaaaaagtcaaaacgctcgacgaagcaacagatcaagtgctttccggacttgtggccgttatcgttgaagacgcgggcttcgcctttatcgttgacgtcagaagttaccccggacgcacaccggaagaaccggatacggaaaaggtcgtccgcggggcaagagacggttttatcgaaaatatcgtcattaatacagcattgatcagaagacgaatcagagacgaaaggctccgcgtcaaaattacgaaagtcggcgagcgctctaagaccgatcttgccattgtgtatatagaagacatcgcggacccggaccttgtcagcatcgtcgaaaacgaagtgaatgcgattgacattgacggattgacgatgtctgataaaacagtggaagaattcatcgtcaaacagggctacaacccgtttccgatggtcagatacacggagcggccggatgtggccgccaatcacattttggaagggcacgtcatcatcgtcgttgatacgtcaccgagcgtgatcataacgccgacaacgatttttcaccatgttcagcatgcggaagaatacaggcaggcgccttcagtgggaacatttttaagatggatcaggttcttcggtattatcgcttcaacggttctgcttccgatctggtttctctttgttctcgaaccgtctcttctgcctgaaagattggattttatcggtttaaataaaaatacgcacatcccgatcattctgcaaatctttttagccgatttggggattgagtttctcaggatggccgcgatccatacgccgaccgctttatccaccgccatgggtctgattgcggcggtgctgatcggtcaaatcgccatagcggtggggctgttttcagcagaagtgattctgtatgtatcgatcgccgccatcggatcatttaccacgccgagttatgagctcagcctcgccaataaaatgatacgcctcatcttaatggtgctcgtggccattttccaagtgaaaggctttgtgataggctttacattgctgctgatcataatggcgaatatccgttcgtttcatacgccgtatttatggccgtttttaccgtttaacggcaaggcgctgtggcaggtgctcgtccggacgacagtgccgggagcgaaagtcagaccgagcattgttcacccgaaagaccgtcaaagacagccaagcggttcataatcgcattgaaaccgacagaagattatgatattgtatgtcttaacttatacgggacttgtataaggacagctcaaaagaagctgtccttttcacccataggcggatcagaaagagggaatgagcattgttcttacatggcacaagcagacaaaacaaactaggtcatttggaaatcggaggtgtggacgcgctgtatttagcggagcattacggcacgcctctttatgtttacgatgtggctttaatacgtgagcgcgctaaaagctttaaacaggcattcattgacgcggatttaaaggcgcaggtcgcgtacgcgagcaaggcgttttcttccgttgcgatgatacagctcgctgagcaggaggggctctcattggacgttgtatccggcggagagctgtttacggcggttgcggctggttttccggctgacaggattcattttcacggcaacaacaaaagcaaagaagagttgaaaatggcgctcgatcatcaaatcggctgcatcgtcgttgataatttttatgaaatatccttactcgcggaactgtgccgcaaatcagggcgcacaatggatgtgcttctccggatcactccgggggtagaggcccatacgcatgattatattacaacggggcaggaagattccaaattcggttttgatctgcataacgggcaaatagaaaaggcgattgaacaagtattgcagtcagaccatatccgccttctcggcgttcactgccacatcggatcgcaaatttttgatacggcgggctttgtgctggccgcagaaaaaatctttgcaaaactgaatgaatggagagaatcattcggctttgtctctgaagtgctgaatttagggggcggcttcggcatccgctacacggaagaggatgaaccccttcatcccgccgtttatgtggaaaaaattatcgaagcggtaaaagaaaacgcagcgctgcacgcttttgacattccggagatctggattgaaccgggacgctcgctcgtcggagatgccggaacgacgctttataccatcggttcgcaaaaagaagtgcccggcacccgtaaatatgcagcggttgacgggggcatgagcgataatatccgtcctgcgctttatcaggcgaaatatgaagccgtatcggcaaacagaatcggagaacaccacgacaaaacggtatccatcgcgggtaagtgctgtgaaagcggggatatgctcatttgggatatagaccttccggaagtgaaagaaggcgatcttctcgccgttttctgcacgggagcgtacggatacagcatggctaacaactacaaccgtattccgcgtcccgccgtcgtttttgtggaagacggcgaagcgcatcttgtcattagaagagaaacttatgaagacattgtaaaactggatctgccgtttaagactggggtcaaacaataaataaaaaagagaccggaacaatggcgtccggtctctttttgcgttcagctgtcagaacttgatccgctgtctcctgtaaatacagacacgatcgcattccaaatcgaagcgaagaaatcaataactttttgaacaaagcttttgccttcatcggattgaatgaacttcgtgattttgtcttttgccttatcgagctggctgccgacttggccccaatcaatctttgcatttttcattttattaaacaatgaaacgagctggtctttttgagcgtcagtcagtgtaatgttaaggtttgaagccgcatcatcgacctttttctcgattccttcttttgtatcgggcacaccgtttttcgcgaaatcatctttaatgtttgcgataagcgcggaggcgtttttatccccgattttatccccgagatttgaagtggtgacaagctcttggttggcgacctgttttacatcttctgaaatcgctttgtctgatgagacttcatatgccttgatgattcccgttaatgctgcggtgcctgatacctcaaacggcgccgtcacgtatactttcgcatctttcactcctgctgtcatcagggcgtttaagtacatttcatccgtaatggaatcgatattatgggtcttaacgtcaagcccggaccctttctttgccaccgtaatggatgacgaagagatggctcttgtgccgatttgggcattcgatatatattttcccagatattcatgttcttctttatttgtgaccgtcacttttgtcgcgttatcagggacatttaattcgtcaagcactttctgacggttttcgtttgacagatccgcccccagtgtgacgatgacatctccgactgcggcatcggccaggctgattttcggtattgtgcacaatacaacggccgccgccagcaatccaatccacatttttttcaaagcggttaacctccttcttttcacaaatgccgttttgaagcggtttgtgaggacctgcgagaagcagttccgatacatagacggctgtgaagctgttctggtttcattttctttctgcggaagcggggagattcgttttccggctgaaggtgtggtataatagccgcgaaaagaagagcagaggcctcttccttcaaaagaatatcaaaaagaaagccggcttacaattgaaattcatattaaagaaggctttgacaaaaaacaatacggaagtaggaatgagaatgaaaactggttacatcgaaatggaaaacggcagcagaatcgaatttgaactttatccgaatgaagcgcctaatacagtcgctaactttgaaaatctggcgaatacgggcttttatgacggcgttattttccaccgcgtgattccgggctttgtcagccaaggcggagatccgactgggacaggcatgggcggaagcggaaaaacgatcaaatgtgaaacagaaggcaatccgcataaacacgaagccggttctttatcaatggcgcatgccggtaaagacacgggttcaagccaattcttcatcgtacatgagccgcagccgcatttaaacggcgttcatactgtattcggaaaagtgacaagcggtttagagcatgcgaaaaacatgtctaacggagacaaaatgaaagaaatccgtgtagaaggataatgacggaaaacccgcctttttcaggcgggttttttttatgtatatgaaaattctcatgtgtaaatcatgaaaaaatacatatatgaacatcggtgatcattctggtatagtgaaaaagaccgattacaacaatgaaaagaggtagaaacgttggttcaattggcaaccgttttatttgtcattatcattctcgcacttatgatttggttcagggtaaaaaagggaaacaggccgattaaaggcggcggcttaggcatcattctcccgcttttgattatcgccgtcatttttacattcagtatcagccagctcatgaatatcccgggaaagccgtttcattttcccgctctttgggagctcgccatcgccggactgttaggcgcggtattcggtatcatcatgctgtcgcaaaccgcctatgaaatccgggaagacggctttgtctactccaagcggaataaaaactttaaatatgtcattatcgcgattattgcgatccgtatcgcactcagccaatatttcaaaagcattgacgcggctgaattcgccgttttaacgatggagcttgcttttgtgtatttgtgcatttggcggatcggaagcttcgtgaaataccgtaaaatcagcagatccggcttataaaatgaaaaaaagggatggggtgcggggcttatttgccctctgtgcagggattcatggtaaaataaaaatgaccatggctaatgggaggaaatcacttgaaatcagaaaaagaaaaaacttctaaaaaaagcgccgtacttgattgggcgaaagccattatcatcgctgtcgttctggcactgctcatccgaaactttttatttgccccttatctcgttgatggtagatcaatggatccgacgctgcatgaccgcgagagaatctttgtcaatatgacggtcaaatacataagcgacttcaaacgcgaccagatcgtcgtgctgaacggagaaaatgagcactatgtcaaacggattatcggacttcccggcgacacggtgcaaatgaaaaacgatcagctgtatatcaacggcaaaaaagtgtccgaaccgtatttagcggcaaataagcacaaggcgaagcaagacggctatgaccggctgacagaagacttcggcccggtgaaagtgccggacgacaaatatttcgtcatgggtgataaccgcagagaatctatggacagccgcaacggcctcggtctttttacaaaaaaacaaatagcgggcacatcaaaattcgtcttcttcccgtttaacgaaattcgcaagacgaaataaaccgtacaggcagttttcttcatgagaaaactgctttttttatataaatttatctctccaccctcaaaaacagaacataaattcgtatatctatttaatagatagaaagttttacagatacatgaaacatcttccctttatgaaacgttatatgaataactcacgcagggaagaacggttttctattcatgaaaaaaaggaatatgacatagtaatgaatagattgatacgggctggaggtagaaaaatgggaagaattaaaacaaaagcagccattttacttgtactgctgctgttattagcgggcggttatatggtcataaacgatattgaactgaaagacgtgccgactgcaatcggacaaaccctgtcccaggaaaaagaagaatatacagtcaaaacatataaaattacgaaaatcgaaggaactgagtaccacggtacggcagcgaacggcacaaaaattatttttaacggcgacaagctgaagcaggatctctccgatgtgcaaaaaggtgataagattaaagcgtatttcagcaaatcaaaccggattgacggcttattgaaggtcgtcaaagtgaacgaataaataaagacgccttttatgggaaaagggcgctttttatttttctgaataatgaggtgcaaattcattgcgcctgccgcaaaggatgttataatagcggataaggacaaaaaaatattgattgtatccttcggggctgggtgaaaatcccgaccggcggtaataaggcgctttgcgctttacagcccgtgacccgtatgcatctgtatacggtggattcagtgaaaagctgaagccgacagtgaaagtctggatgggagaaggatgagagaagctatgcaaaaaataaacttactgtatagtcttatttcctatggattaaaactggcaaagccccgaactgtgtaaacattcggggcttttttgacgccaaattgcgtggaagaagggagggataacaatggatgaatattatatgaatacggcaatagaacttgccagacgcggtgaaggacagacacagtccaatcctcttgtcggcgctgtcgtcgtcaaaaacggacagatcgtcggaatgggcgcccatttgcaatacggagaagcgcatgccgaggttcacgcgattaatatggccggcagacacgcaaaaggcgccgatttgtatgtgacgctggagccttgcagccattacggaaaaacaccgccatgcgccgaactgataataaagtcggggataaaaagggtgttcattgctgtgaaagatccgaatccgcttgtagccggaaaaggcatcggaatgctggaagcagcgggcatcgaagtgaaaaccggccttctcaggcagcaggcagaagagctgaataaaatgtttcttcacttcatgcggaccggacttccgtatgtcaccttgaaagcggccgcgagccttgacgggaaaacagcgaccgaaaccggtgacagcaaatggattacatcagaggcggcaaggcttgatgcccagcaatacaggaaatcgcatcaaagcattcttgtcggagcaggcacagtcaaagccgataatccgagcctgacctgcaggcttcctgatgcggtgaagcagccggtcagagtgattctcgatacaaagctgaccattcctgaaacggcaaatgtgctcactgacggcgctgcgccgacatggatatttacggccaaaggtgcagacgtgcaaaagaaagaccggctgaccgcactcggaataaaagtttttccgctggaaacagaccgcattcacatccctgaggtgctcagtgttctcgctgaaaacggaataatgtccgtttatgtggaaggcggagcatccgtacacggaagttttgtgaaggaaggctgtttccaagagcttcatttctatttcgcccctaaattaatcggaggaacgcttgctcccagcttgatctccggtgaaggttttcaatcaatgaaagatgtcccccatttgcaattcacacaaatcacccaaatcgggccggatataaaactgacggccatacctaaagatggaaaggatggtgacgatgtttacaggaatcgttgaagaaacaggcacgatccaagcaatcgaaaagacaggcctttccatggcattaaccatcgccgcttcaaaagtgacaagtgatgtgaaacttggcgacagcattgcggtaaacggcatctgcctgaccgtaaccggattttctgacaatcaatttacggttgatgtcatgccggaaacagtgaaatccacttcgctgaacggcttgtcaaaaggcagtaaagtaaacctggaaagagcgatgtccgccaacggacggttcggcggccactttgtatcagggcatgtggacggaacggcggaaattacgcggatcgagaaaaaaagcaacgcggtctattacgatttaaaactttcgccggaattgacaaaaacgctcgtattgaaaggttcaattacggtagacggcgtgagcctgacgattttcggtctatcagatgaaagcgtgacggtatccatcattccgcataccatctcagaaacgatttttcagacgaaaacagtcggatcgaccgtaaatattgagtgtgacatgatcggcaaatacttataccgctttttgcacaaaacagaacaaacgaaaagcaatcaaactatcacggaagcctttttaagcgagaacggcttttagaaaggaagatcgatatgtttcatccgatagaagaggcgttagaggcgctgaaaaaaggtgaagtcatcattgttgtcgatgatgaagacagagaaaacgaaggagatttcgtagcgctggctgagcatgccacgcctgaagtggtgaattttatggcgacccatgggagaggtctgatctgcacgccgctgtctgaagacatcgccggccggctggatcttcacccgatggtcgatcataatacggactcacatgagaccgcctttacggtcagtattgaccacaggctgacaaaaacgggcatcagcgctcaagaacgttcttttaccattcaggcgctgttgaacgaggaatctgtgtctgacgattttcagcgtccgggccacattttccccttaatcgcaaaaaaaggaggcgtcctgaagcgggcgggccatacggaagcagccgttgaccttgcaaaagcctgcggatctcagggagcgggcgtcatttgtgaaattatgaatgaagacggcacaatggccagagtgccggagttagccgaaatcgccgaacgtcaccagctgaaaatgattacgataaaagacttaatagagtaccgttacaacattacgacacttgtgaacagagaagttgatattacgctgccgactgacttcggcacgtttagagtttacggatatacaaacgaggttgacggaaaagaacatctcgcctttgtcatgggggatgtcccgtttaacagcgaacccgttcttgtcagagtgcactcagaatgcctgacgggcgatgtgtttgcatcccatcgctgtgattgcggacctcagcttcatgccgcgcttgcgcaaattgctgaagaaggccgcggcgttctattgtatttgcgccaggaaggcagaggaatcggtttaatcaataagctgaaggcgtaccgattgcaggaacaagggtacgacacggttgaagcgaacgaagcgctcggctttctgcctgatctgcgcaactacggcatcggcgcccagattctccgcgacttaggggttcagcatatgaaacttttaaccaataacccccggaaaatcgccggcctcgaaggatacggtctcagcatttcggaacgggtgccgcttcaaatggaagcgagtgagcataacaagcagtatttacagaccaaaatgaaaaaacttggacatctgcttcatttctaaaaacaaatctcacaaaaaaggatggataacatatgaatatcatacaaggaaacctagtaggaacaggacttaaaatcggaatcgtcgtcggcagatttaatgaatttataacgagcaagctgttaagcggagcggaagacacgctgcttcgccacggtgtagaatcaaacgacattgacgtcgcttgggtgccgggagcgtttgaaatcccgtttgcggcaaagaaaatggcggaaacgaaaaaatacgatgccgtcattacgctcggcacggttatcagaggagcgacaacgcattatgactatgtctgcaatgaagcggcaaaaggcatcgcccaggcgggaacggcgacgggcgtcccggttatcttcggcatcgtgacgactgaaaccattgagcaggccatcgaacgagccggaacaaaagccggaaataagggagcggattgcgcagtatctgccattgaaatggcaaatttaaaccgttcatttgaataatttgttgaaaagcgtttaaaaccgcggcgaaaatgatataatgtgagaaaacggatcgcctttatgtatccgtttgataggacatgaatggacattttggatatagaggggtttttatgttaattcgttataaaaaatcgtttgaaaagattgcgatgggtcttctgtcatttatgccgaatgaaaaagatctcaagcagcttcagcagacaataaaggactatgaaacggatactggccgccagctctttctttggaaagaggatgaagatatcgtcggagcgatcggagtcgaaaaaaaggactcagaggttgaaatccggcatatcagcgtgaatccttctcaccgccatcaaggaatcggaaagcaaatgatggacgccttaaaacgtctgttcaaaacggaggcactcgttccgaatgaattaacgcaaagcttttttgaacgctgtcaacatcaaaaagatcaggatatctcatataataactgacaaatgctcccggaatcttcacggtttcgggagctgttttgatatagaaaaagcagggctgaccgtcagcctctgcttttttttcttctctcaatttcccgttcgcgttccttaatgacatccgtcctgtcccgcaggcggtgtttatgaataagaaaggtatctgatacgccgtcttgcccccatgtatagccctttcggcggcattcggcaagacatgcttctttcagggcttcatctgtaatcggaagcataacacttctgtaaggcaggcccgcttctatatcgtctgacagcgtttctatcagctcaatcagcttcggatggctgagaccgagagaacagaccgcctgcttttcagaccggagaatacgtaagctgttggcaatcagccgtttcgccccggcttcatttcccctgcgctggtgatacagagcgacggcaagctgaatcaggccgacccaatgaatgctccgcttttcagccgggctttctttccaatattcctctaacagttcatgacattcaaaataatctcttgatgcgtgaaattcggccaaaaagccgatataagctttaggatacaagccgcttcctccttttatgctaaaaccagtgtaccacagcgctttgaaaaggaaaaaagagcggcttggtgtctgaagcctgaggaactagcagatgtaagatgctcctacgacaacgagcaaaataaacagaacgacaattaatgcaaaacctccgccgaaacaagctccgctcatgtgaaatcagcctccctttgtttcaagtttacacggctatcctatgtgcatccgcctttaaaggtataggcgtatatcttctttttcagtattttctaaataacggaggacgtgtataaaagtattggacgagagcatttcggtggattatactaaagggtagccagtttttccggcaatgagagtgatactgaaaatggtgagataatggtagaatatcaagtgaaaattgatacgtttgaaggcccattggacctgctgcttcatctgattaaccgtcttgaaatcgacatatatgacatacccgtggcaaccattactgaacaatatttattatatgtacatacaatgcaagagcttgaacttgatgtcgccagtgaatatctggtcatggcggcgacgcttctcagcattaaaagcagaatgctgcttccgaaacaagaagaagagctgtttgaagacgaaatgcttgaagaagaagaccctcgggacgagctgattgaaaagctgattgagtatagaaagtataaaaccgctgcgaaggatttaaaagagcgggaagaagaaagacaaaagtcatttacaaagccgccgagtgatttaagtgagtatgcaaaagaaatcaaacagaccgagcagaaactgtcggtgaccgtttatgacatgatcggcgcgtttcaaaaggtgcttcagcgtaaaaaaatcacgcggccgaaagaaacgaccattacaagacaggaaataccgattgaagacagaatgaaagaaatcgtaaaaagcttaaaaacggcggggagaagaataaacttcacggagctttttccttctcggcaaagggaccatctcgtcgtgacgtttttagcagtcctggaactgatgaaaaatcagcagattatcattgaacaggaagaaaacttttcagatatatacattacggggagtgaatccattcatggcgtttgatatcgtgaattggaaagcgattgtggaagccctgctgtatgcggcgggtgatgaaggactgaccaaaaagcaattggtgacggtgcttgaaatagaagaagcggaactggccggaatcatggaagaagtggccgctcagtacaaggaagacgacagaggcatcgagcttaccgaatatgcggatacgtatatgcttggaacgaaaaaagaattcgtgccttatttgaaaaaactaatcgaagtgccgtcaaaagggctgtcgcaggcttctttggaagtgctggcgatcgtttcgtacaagcagccgatcacacgggcggaaattgaagatatccggggcgtgaagtctgagcggattctgcacagcctcgtgtcaaaagcgctgctgtgtgaggtgggccgcgccgacggtcccggccgggcgattttatacggcacgacaccggtatttcttgaacaattcggcttaaaaacattggaggagctcccgccgcttcctgaaaatgcggaggaagacgttctccaggaggaagccgatttattctttgaaaacttcaaccaaacttttgaggatattaaataataatcgtttttcatcatacgatagtagggaaaggccattgatgaatgacgcaaatgacgacgtacaagagaggaaggaaacggacggaaatgggaaattcgattgtgagggcccatactgaagaaactggtgaatttttagccgaggttgtcacgatggtcagcagctatttaaatcatacaacattgccggagatgcgggctcaaggagaggcggatgaggcatactgccgcgacgtgctcagtgtgctgaggaggatgaccgtcttttgcgaaggcgcccaggaagcctgccggcggctcttaatgcaggagccgtttcatgaggtgagagcggaaaaaacgctgtataaagtgtatcatcagtgcgtggaagaatttttcatgccaaaaaaggatacatggtacgaaaacagccgcgccgcttatacaggccaaagcgcgattgagttctaccagcaagtgccggactcgctgcggagccttctgctttcgctcagcagtgaatttctgcggatgcgggaagaattggcgcaatatgaagcatcaggctcaaatatggcatcagtcagataaaaactcttccttttgggagagtttttttatgtgaaagtgatgcaattggtattcataagtcatggacaggcgcataaacttgtacaaacccacaacaaggacgtgagcattcatgcgctttctcaaaaaagctgccgtatttcttttgacttttgttattcttttttccattacagacggcaatacggcacatgcccaaatacatgtcagcgcaaaaagcgcgattattatcgacggagcatctggcagggtgttattcgccaaggatgaacatcataagcggcggattgcaagcattacgaaaatcatgacggcggtgctggcgattgaatcaggaaagatggaagagaccgtgacggtttccccgaatgctgtaaaaacggaaggctcagccatttatcttcagccgggacaaaaagtaaagctgaaagatcttgtatacgggcttatgctgagatcaggaaatgacgccgctgcggcaatagctgaatatgtcggcggaagccttgacggttttgtatttatgatgaacaaaaaagccgagcaaatcgggatggaaaatacaaaatttcaaaatccgcacggactggacgaccatgaaaatttatattcaacggcgtatgacatggcgcttttgactaaatacgcaatgaaaatcaaggaataccggaccgtttcaggcacaaaagtgtataaggcggaaacgatggaccgggtatggaaaaataaaaacaagcttctgactgggctctaccgttacagcacaggcggaaaaacgggttacacaaaaatcgcgaaacggacgctcgtttcgacggcttcaaaagacggaacggatctcatcgcggtcaccataaatgatccggatgactgggatgaccatatgaatatgtttaattatgtctttgaacactataaaacctatgtcgtcgctaaaaaaggcggcattccgaagctgaaaaagacgttttacggaaaacacgcttttattgcccgggatgtcaaatatttattaaaagaggatgaaatcgacgatgtaaaaatccgcacaaccttaataaaaccgaaaaaagcctggaaaaaggacgcctctctcattcctgatgtcgtcggccggatgactgttatgcatgatgggaaagtgatcgccaagattcccgtctattatgaaaacgagcgccataaaaaaccgaaaaagcatttcattgagacgtttacgagcctgtttatgagcgcggcgggcggttcgtcatggtcaatttaatctgggtatgtctgacggtaatcggacttgtctttgcgatgtttaacggtaccttgcaggatgtgaatgaagctgtttttaaaggagcaaaagaagcggttacgatctcgttcggattaatgagcgtgctcgtcttctggctcggcctgatgaaaatagccgagcagtccggccttttggatatattcagcagaatgtgccgcccgtttatctctaagctgtttcccgatattccccctgatcatccggccatggggtacatcttatcaaatctcatggcaaactttttcggactgggaaatgcggcgacaccgctcggcattaaagccatggagcagatgaaaaagctgaatggaggtaagtctgaggccagccgttccatgattacctttttggcggtaaatacttcgagtattacattgataccgacaaccgtcattgccgtgcgcatggcttattcggcgaaatcaccgaccgatatcgtcgggccgaccatcttagcgactttaatttcgggaatcggcgcgattttcattgaccgctacttctggtaccgccgcaaaagaaaagggaggtaagcgaatggaaatggtgaattggctgtctttagccatgattccgattattatcgccggtatattgatatacggcacgatcaaaaaagtgccgacgtatgaatcattcgttgaaggcggaaaagaaggaattgagattgcgttttccatcattccgtatttggtcgggatgctggtggcgattaccgtattccgggcctcaggcgcgctggattttgtcatggggctgtgcaagcctttctttacagcgctcggcattcccgcagaagtcgtgccgcttgctctgatccgcccgatttcggggacggcggcgctcggcatgacgacagatctgatcgccgtgtacgggcctgattcatttatcggcagactggcctcggtcatgcagggatcgactgatacgacgctgtatgtcctgacggtgtatttcggggcggtcggcatcaaaaaaatgggggatgctttaaaggtcggtcttcttgctgatctgatcggggtggttgcatcaatcatcatagttgcgttattatttggaagcgcctgaaatcaggcgctttttatatatcagaataactctccttgaaaaagcttgtttgttcaaggggaaaaaagtaagattatacttgaggtgaacgacatggaaagactgcaaaaagttattgctcatgccggcgtggcatcacgcagaaaggcggaagagctgataaaagaaggaaaagtaaaggtgaatggaaaagtaataacagagctcggcgtaaaagtgaccggttctgatcagattgaagtaaacggattaaaggtggagcgggaagaacccgtgtactttctgctttataaaccgagaggagtgatctcagcagctgatgacgacaaagggcggaaagtggtgaccgactttttcaaagaagtgccgcagcgcatttatccgatcggcaggcttgattatgatacgagcggacttttattgctgacaaatgacggcgagtttgccaacaaactcatgcatccgaaatacgaaattgataagacgtacgtcgccaaagtgaaggggattccttccaaggaacttctgagaaagcttgagcgcggcattcagcttgaagaaggcaagacggcgccggccagagcgaaaatgctttccctggacaaaagaaagcagacgagcattattcagctgacgattcatgaaggccgaaacagacaggtccgccgcatgtttgaggcgatcggtcatgacgtgctgaaactcaaacgtgaagaatacgcatttttagatttaagaggcctgcgcacaggagacgcaagagaattgacgccgcatgaggtgaaaaggctgcgggctttagctgaacacggtaaaaacgctttctaattttcacataaccttcaaaaattacaaaacgtgtagatgatataattgaatggatttgcagacaggggaggggagcagtgtacaatgaacaaaaaacggcggcgtttattcattcggaccggcatccttctcatcttactctgcgcgctcggatataccatctataatgccgtttacacaaacggagagcgtatatctgaggggtccaaagccccgaatttcgcgctgaaagatacagagggcagactcatagaactgagtcagttaaaagggaaaggtgtttttctgaatttctggggaacgtggtgtgagccgtgcaagcaggaatttccctacatggagaatcaatacaagcattttaaagacctcggtgtcgaggtggttgcggtaaatgtcggcgaatcaaaaattgcagtacataattttatgaaaacatacggcgtcaatttcccggttgcgctcgatactgaccggcaagtgctggacgcgtacggcgtatcacctattccgacgacatttttgatcaatcccgacggaaaggtcgtgaaagtggtgaccggcacgatgacagaacgcatggttcatgactatatgaatttaattaagccggaggcgtcttcatgaaaaaggtcaaatgtgagtgcgggcacgtgaatccagccgggacggttttgtgcgagtcgtgcgggaagccgcttgatgatcaaaaatcgccgcttgccgatatgcggtacgacggcagcgcaaggcgttcgcaaacatataacaaaacaatcgtagataaggtatggaacttcttttcttccgtaaaagtcggaatatggctgatcgtcattactctggcggcgtctgctttcggcacggtttttccgcaggaagcttatctgcctccgggcgcccagccggatacatattatgaacagcagtacggcataatcggccaactgtattatttgctggggtttcatcacctgtacggctcatggtggtatatgctcctgatcgcatccattggcatatcactggtcatctgcagcctggatcgggtgattcctttgtacagggcgcttaaaaatcaaggagttcggcggaatccggtctttttgaagaggcagcgtctatacagccggacagaaaccgagctgagcggggatgcggctgatagcctcagaacacgattgaaaaaaaagcattatagagtgcgagaacaagagggaagcatcctggcggaaaaaggccgtttttcaaggtggggaccctatgtcaatcatatcggcctgatcatttttctgatcggagccatgctgagatttgtacccggtatgtatgtcgatgaaacgctctgggtccgtgaaggcgaaaccgcccagatccccggtacagacggcaaatattacttaaaaaacaaccggttcacgatgcagacatataacaaagacactgagaaaaaagtattcgccgacgccattgacagagccggaaacggcaaagtcgccaaatccttcacaacggacgcggttctgtacaagagggaaggcgacattgtattcggtgaaaagccgaagcttaaaagagtcaaagaaaacaatatccgcgtcaatgaaccgctgcgctttgactcctattctgtgtatcaggtggactataaagaaaaccagctcgatcagatggtatttcagctgatcgaccaaaaaacaaaacagtcattcggcaaactgaagatcaatcttcttgatcccgacacggactacgatcttggtaacggttacaaagtgcagattgccagttatcttcctgatttttattttaacaaagacggagaaccgagcacgaagacgaaggttcctaacaatccggcttttgtctttaaaatcacggctcccgacaagccgaaaggggagaaaagttttgttgcgattcagcagactgttgaaggttccgaaagtaacaagtacaaattaaaattcgaccatgtggaaacgaaaaacattacaggactcaccgtcagaaaagacttaaccttatgggtgcttgccgtcggcggcgcgatctttatgatcggcgtcattcaagggatgtactggcagcacagaaggatctggatcaaaacaggtgatcatgaagtgcttgtggcgggacatacgaacaaaaactggttcggtctgaaaaaggatatcgaatttgttcttagcgggaccgggattcaagagccggccgatcaaaaagaattggccaaaaatcaggcctagtgaaaaaggagtggtgtcatggcggagctgagcgcaaattttctttatgctgcctttttgatttatttaattgccgtcccggttttcggcggcgccatccggggaacaaaaggtgcgaaggacggtaagggccgctggtcggctatcggaatcacgttaaccattttcggatttctttgtcacctcggctactttattgcgagatggtcggcaagcggacatgcgcctgtcagcaatatgtttgaatttacgacgtcattcggcatgatgcttgttctcgcttttattattatttactttatttacagactgccttcattaggcatgttcacattgtctatcgcgcttttgcttatcgcatatgcaagcatgtttccgacagacatcacgccgcttattccgtcactgcagagcaattggctgtacattcacgtcacgactgcggcgctcgggcaggcgattcttgcgatcagttttgtagccggcgtcattttcctgttaaagcatgtcgaccaatccagaccgggcaaaaaaacgttctggcttgaagtcatcatgtttatactcgtgacgaccgtggcatttatcgccgtcacgtcggcattccggctggcggactacaaagcagaatttaattgggtggataaaaaagaggctaaaagcgtgatgatatatgatatgcctgcgcttgtcggcccgcatgacggagaactgcttacggaaggcgcaatgaagccgcttattgagcttccggccattttttcaggcagaaaggtcaatacggtgatctggtcgtttggcgcaggtctcgttttattcggggcgctcaggctgatattcagaaagagaatcagcgctcttataagcccgctcgtcaaaaatgtgaatctggacttggtcgatgaagtcggctaccgcgctgtttccatcggttttccggtattcacactcggcgcgcttgtgtttgcgatgatttgggcgcagcttgcatggacgcgtttttggggctgggacccgaaggaagtatgggcgctgatcacctttttattttacgcagcgtatttgcacttgcggctgtcaagaggctggcatggcgaaaagtccgcgtggcttgccgtcatcggcttcgccattattatgtttaacttaatttttgtgaatctcgtgcttgccggacttcattcgtacgcatagatgcaaaaagccgatacagttctcaagctgccgcacagtttgttaaaatgaaagtaacagaaggaaagcagggggaaaacgatggatcaaacaaatgaaactaaaatattagtagtagatgatgaagccagaattcgacgccttttaagaatgtaccttgaacgggaaaactatgtgattgaagaagcggaaaacggagacgaggccattaaaatggggctggcatcagattatgatctggtgctcttggatttaatgatgccgggaacggacggaatagaagtatgccggcagctcagagaaaaaaaagcgaccccgattatcatgctgacggcaaaaggggaagaagccaaccgcgtccaagggtttgaagcgggtacggacgattatatcgtcaagcctttcagcccgagagaagtggtgcttcgggtaaaggcgcttttaagaagggcttcccaaacatcttatctgacagccaataccccgacaaaaaatgtactcgtcttctcgcatctatccattgatcatgatgctcacagggtgactgcggacggcacggaggtgagcctgacgccgaaggaatatgaactgctgtacttcctggcgaaaacaccggacaaagtgtacgacagggaaaagcttttaaaagaagtgtggcagtatgaatttttcggagacctcagaacggtggacactcatgtcaaacggctccgtgaaaaattaaacaaagtgtctccgggagcggcgaaaaaaatcgtcaccgtctggggagtcggatacaaatttgaggtaggcgctgaatgaagttttggaaaagcgtagtaggaaagctttggtttaccattctttcactcgtgttaattgttttatttattttaacggtgctgcttctggaatttatagaaaattaccacgttgaagaagcggaaaaagatttaacgcagcttgccgataaaattgcggtcataatagaaaatcatgaagaccagccgcttgccagatccatcacgtgggaactggcggacaatttaacgagcatcgcgatcattcaggatgataagcatgtctggtattcgcccaatgacgataatcatttatcctctattacattagagcagattaaacatgaccgggatctgcacaaggcgctgacagaccgcaataaagtaagcaaacgcgcggtccccaaaaatgccggttcggataatgaacggctgatcgtcggagtgccctatgaaaaagacggcaaaaaaggcatggtctttttatcccaatcgctgcttgccgtcaaagatacgacgaaacatacgacacgctatatttttcttgcggcgggcattgccatcgtcttgacaacgtttttcgcattctttttatccagcagggtgacatatccccttcggaaaatgcgggaaggcgcccaagacttggcgaaaggaaagtttgatacaaaaattccgattctgacccaagatgaaatcggggaactggccattgcctttaatcagatgggacggcagctcaatttccatattaacgcgctgaatcaggaaaaagaacagctgtccaatattttaagcagtatggcagacggggtcatcaccattaatatcgacggcaccattttggtgaccaacccgccggccgaacgttttctgcaggcatggtattatgagcagaacatgaacattaaagaaggagacaaccttccccctgaagcaaaagagctgtttcaaaatgcagtgaacacggaaaaagagcaaatgattgaaatgacgcttcaaggaaggtcatgggttttattgatgtcgcctctttatgcggaatcacacgtccgcggcgccgtggccgtgctccgtgatatgaccgaagagcgcaggctggataaattgcgtgaagacttcattgccaatgtcagtcatgagctcagaaccccgatttctatgctgcaaggatacagtgaagcgatagtggacgacattgcaagcaccgaagaggagaaaaaagaaatcgcgcagatcatttatgatgaatctcttcgtatgggccggctcgtcaatgatttactggatttggccagaatggaatccggacatacgggtctgcgctatgaaacggtaaacctgcatgaatttctggagaagatctcccgcaaattttccggtgtagcgaaggaaaaaggcgtttcgctcacagaggacatctcggtgtctcagccggagtgtgtctttgacgaagacaaaatggaacaggtgtttaccaaccttatagataatgcgctgcgccatacggagtcaggcggaaacgttcatatcgcggctcataccgtaaaagacggactgaaaatcgatatcaaagattccggctcgggaataccggaagaggacctgccttttatttttgaacgtttttataaagcggacaaagcaagaacaagaggcagggcagggaccggactcggactcgccatcgtaaaaaatatcgtggaagcccacggcggctcaattgcggttcacagcagcatcgacaaagggacgacgtttacattttatattccgacaaaagcgcaggatgacgtctgaaattgacgaacaatcttgttccatacgaaacacccgcagaacatgcgggtgttttttgtttttttctcctttaaaaatttaagaatatgttaatataaattcccttccaaattccagtttctcgtaatatagttgtaatgtaacttttcaacgcatttttacgacaaaaaagtgaacggaggggtttcccatggaagaaacctttcagatattatacgatgcataccatcaagatttatatcaatttttattttatatggtaaaagataagtcgcaggctgaagatttgacgcaggaagtgtatatccgcgtcttgaattcctatcatacatttgaaggaagaagcagtgaaaaaacatggctgttgtccatcgcacgccatgtggcgattgactggttccgcaagcagcagacgatcagacagcgtattatgggtacgtttgattgggatacacaagatgtcagagatcagcatttgcttccggacgaactcgccgtacagcatgaaaatgtccgggaaatttataccgcgcttgatcattgcaccattgatcaaagagctgttattatcttgagatttattcagggatattccattcaggaaacagccgccgctctccgcttctcggaaagcaaagtcaaaacgacccaacacagagggctcaaaatacttcggaaacagatggagcttttgagggaggagctaatggatgatgaagtcatattggaacgaagaaagagtagaggagttgttaagacaacttccggcggttagagatcatcgttcacccgaggccatttaccggaatattgaaacgggtaaaccgtacaggaaaaaaccggcccgaagctggatcggccccgctgcagccggcatctgcgcattgtgcatcgctctgattatttctcctcacctgatgacaaacaaatctgccggtgatcttacagctgacagcggtcaagctgaaaaagccagtcagtcagctgctgtcaagccggatcagaagacgtttgtcgtttctaacgaaaacaaaaacaattacattactttggcgtttgccgattcagatacatccgccgtcattccggtcagttttgaaaaaaagaagcctgacgaatcggtttcagaggcattatctgatgcaggaaacttagaagtgcccgaatctttcctctctgtgccgaaccttttggacggtgtgcaggtaacggcggataagaaggatttgcttgtgcaggtaaacggacgtctttctatcgaatcagctgccgattctgatttattgaaaaagatgctgaaagagactttgacatggagtccttacgagcggattaaattgaaaaaggttcaaaacggagacggacaggatttttataaatcttacggcatttccgctgagatgtccgtacataaacagacaaaccgggcgtatttttcttacagcgacagtctgggacaagagtatctcatcccgtctgaacaaacctattattcagtatatcaggctattgacgggatgaagacaacagacggaggctcacagaccgcgagcattatagaagcagatgcgattgcatcggtatcggaaagggaagacggcgagcagctgcggatccaattgtccgaaaaacataaagttgaagattcgctggaaggcattttaatgatcgaagggcttttgttaaccgcgaaggaattcggttattctgaggtgctgttcacacatgcgcacgcaaagaaaatcggtaattatgatgtgacaaaaccgattgctgtgcctgccgcgcctaatccgcttccgacccattaaacgtaaaaaaacccaaaacatatgaatgttttgggttttctgttggttacggaaggtcaatcagtttaacggaaacaatatcctgaaccgaagtcagctcattgacgactttatcatctaaatgtttatcaaaagaaagcatcataatggcttctccgcctttttctttacggcccacctgcatggtagcgatattgatatcgttatcgccgaggatgcgtccgacgcgtccgattacaccagtcgtatcctggtgctggatataaacgaggtggccggcaggatttaagtcaatattaaagccgttcagttcaacgattcgttcaccgaagtgagggatatacgtagccgttaacgtaaatgtgctccggtctccggttacttttacgctgatgcagttatcatatcctgattcattggaggaaatcttctcgctgaagctgataccgcgttcttttgctacaccgcccgcgtttacttcattgaccgttgagtctacacgcggttttaagaaaccggacagcaggctttttgtaataaatgatgtttcaagtttggcgatggtgccttcatattgaatcgcaacatctttgacgggttccttcatacattgtgatacgagacttccgattttatcggcaatttggtgataaggctggatttttttgaattcatctttcgtcatcgcaggcaggttgatcgctgacatgacaggcagaccttttgcaaactgcagcacttcttcagaaacctgtgccgcgacattcagctgtgcttctttcgttgaagcgcctaagtgaggtgtggcgatcaccagcggatggtcgggaagctttgattcaactggcggttccacttcaaacacatcaagggcagcgcctgcgacatggccgctttccagcgcttccaaaagcgccgcttcatcaataatgccgcctcttgcgcagttgataagacggacgccttttttcgttttggcaatggtttctctgttaagcaatccttttgtttcctttgttaaaggcgtgtggacggtaatgatatccgcgctttcaagcacttcttcgaatgtccggctgtttacgccgattttgccggctctctcttcggttaagaaaggatcgaatacatgaactgtcataccgaacgctctggcgcgctgggcaatctcgcttccgatccggcccagaccgacaatgcctaaagtctttccgtagagctccgccccgacaaaagccgtccggttccattctcttgattttactgagatattggcttgcgggatgtgtctcattaatgaagaaatcatcgcgaatgtatgctctgccgttgaaatggtgtttccattcggcgcgtttatcacgataactccatgttttgtggcctcatcaatgtcgatgttgtctacgccgacaccggctctgccgacgatttttaaagaagtcatctttttaaacaattcttcggttacttttgtggcactgcggactaacagggcatcaaaggtatgtaattcatcttctgcatccgcgacgtttttttgaacaatttctataaagtctgattccatcagcggctttaagccgtcattgctcatcttatctgagaccaaaactcgaaacattgttagatttcctcctagtttagctgactaaatatctgataatttatcatattctcaatagagtgtcaatgtgtattgacgcagtaaaggagaaaaggaaaccgctgaatcagctgaaattgggcttccccaatattttatttaaatttgagcagttctctatacaattacaatttgatcatatataatgtgaataaattcataagatcaatcttcggggcagggtgaaattccctaccggcggtgatgagcgtcacgctctaagcccgcgagctgcttcggcggcaggatccggtgagattccggagccgacagtatagtctggatgggagaagatggaggttcagcagacgttttgatgcttatatcaaacgtttctttgccaagccttagtaagctcccgctttttaacaaaagcggtttttttattggggcgcaaaagaacctttcctcttttcgagagatttgatcgaaaaggagagagcattgtgaaagtaaaaaaattagttgtcatcagtatgcttagcagtattgcgtttgtgcttatgctgttaaatttcccgtttccggggctgccggattacttgaaaattgatttcagtgacgttcctgcaattatcgctattttggtttacgggcctgcggcggggattgcggttgaagcgattaaaaatattctgcagtatatcattcaaggaagcatggccggcgtgcctgtcgggcaggcagccaattttatcgcggggacgctgtttattctgccgacggcgtttatgtttaaaaagctcaattctgcaaaagggcttgcagtgagcctgctggccggaaccgcggcgatgaccgtgctgatgagtattttgaactatattcttatcctgcccgcgtatacttggtttttacattcaccggcattgtcaaacagccagttgaaaacggcggttgtcgcaggaattctgccgtttaacattgtaaaaggcattatcatcaccatcgtctttacgttcatctttacgaagctgaaaccttggattgaacaaaaacgcagcatccaaacacaataaaggcttaaagcgtccgctctgtgaagaacagccggacgctttttttgtttgtgctgatcggcaaaaaaataagactccggccgataacagccggagtcttattcaggacgaaaaagctcctctcacggggagggcttttttattcgtatttcagcgggtcgccttcgaacggttcatccgcaactttgattgaatcagtagggcatccttcaaatgcgtcaatcatatcttcttccagaacttccggaacttcgacgacacctttattttcgtcaagcgtaacgaacgcaatgccttcatcatcataatcataaatgtctggtgccgcagctccgcaggcgccgcatgcaatacacgtatctttatctacaattgtgtactttgccatgaataaaacctcccagattgttcgtgttggaacaaatggtttaccttatatatttttaaatataacacctattcctcttacttattgtaatgatgttagtgtcaaatttcaacagaaaaatgattgagaatgcttatcacataagggattctctttagcacttccccctaaaagatgactttaaacgtcaaatttatatgaaaatctgttaaaataaaaagaaccaaaaaacgaaacttgtcacaaaagaaatgtaggtgtgtttagattggcgataaactactttgataccgtggttctcgactgtctggacaaaatagacggcgaacggactccgagtgctgtgtttcatttattaaaaggaaaaaagtcgtctcaaaccattcaggatgccggcttatttcagatcgctaaatatttcggcatggcttcacagtgtgaacgcggcgatattgcggcttctatgcatagactcaccgagaactcatacatcacagccggaaaagaagagggaacgcggaaagtgactgcgcgcggcgttcaaaggcttgaacgggcgtttgctgagcggccttggccgaagcactgccacggcgcaaattatcaaacgcctgccgtcatcctgtggaggcggctttccctgctcattcaagtcctgtcaaacaaagagcatcaatgcagtcaatatatcccggttaccaacgatgtgcagacgctgagatgggtcaaatggttcatgcggaaaaacagagatgctaaagagctttccgtccaaatgcatgacgcgctgtttcagcttctgcaaggcgtaagtgaacggcaggcgcttatttttgtctattctttaacttcattcaacagaatcggcaaaacgaataagcagctcgctctccagctgaacgaagatgaatggtatgtgtccgtccagttttggggagcggtacattatgttattcaatcgcttccgcaatgtgcatatcccgctctgcgcgagctgttgtccgatctgcaggcggaaagcgcgctgacacagtctgccagaaaaacctttgagctgttggaaaaagggtttccgattgaacggatcgccgcggtcagaaatttaaaaaccgccacaatcgaagatcatatcgtagaaatatcattgcatcagcctgcattttttatagaacagtatctttctgaagaggaacagcgtatgataacggcatttgcaaaacagcatcaaacaaataaaattaaacggattcgcgaaggaatgcagatgcgcttcagctatttccagatcaggctggcgctggcaaagacggtgaatcagcatgactgagctgcataaagctttatccagatattttggtttgcattcctttaaaaaagggcaggaagagattatgactagcgtgctccaaaaaaaggatacgatcgccatgcttccgaccggcggggggaaatcattatgctatcagctcccgggttacatgatggacgggctggtgctgattatttcaccgcttctttcattaatggaagatcaggtgcagcagctgaaagcaaaaggagaaaagcgggttgcggcattaaacagcatgctgaattccgcagagcggcattttattctcagcaacatcagccggtataaatttctctatatgtctcctgaagccctttcttcaccttatgtactgaaccgtttgaaaaacgttccggtcagtttatttgttattgatgaggctcattgcatatcggaatggggacatgatttcaggcctgattattcgaagctcgggcctttcagacaggcactcggaaagccgcctgtattggcgctgactgcaacagcgacaaaagaaacgctcagagacgtgacggatgtgctcggacttgagcatgcggtgcgtcatctttattcagtcaaccggccgaatattctcctggcggcagaacatttggctgataatgccgaaaaaataaacaggctcacggagcttgccgaaaagcttgaaggccccggtatcatatattgtccgaccagaaaatgggcggaagagcttgcggctgagctgaatgaaaaaacgggaaagcggacggattattatcacggcggaatggatacaggggacagaatcttgatccagcagcaatttatccataaccagcttgattgcatctgctgtaccaatgcgttcggcatgggtgtggataagtcagatatccgctttgtcattcacttttatcctccccaaacggctgagggctttatgcaggaaatcggcagagcgggacgcgacggcagcccgagtgtcagtattttgctgagggcgcccggcgataccgagcttcagcagcagattattcagacagaaagcctgtctgattatgatctggaaggcattttggccgtcatacgggatgccggtacggatgatgagcgaaagcttcgggacgttctgatcaataaaggcgtccaggaaacacaggcgcgaacggccgtccatctgtatctgcaaggaaaaaccacaaaagagcagctgcaggaagaactgacataccgcgtggaaaagaagctgcgtaaaatgaaccgtttttcggcgttattagagcggaaagaatgtataagaaaagcgctgctgtcttattttgatgaatcgtatgagcctgaaggccaaaccggacaatgctgcagcagctgcggacttgatctggctccgtacgagcaaaaaggagaacggaaaaacatggaacggtttgaagattggaagctggaattaggccggattttcggttcagagtctgcgggtgagttcagctgagacggcaaagcgaattgatccagcagctctcagaccgggagattgtgatacagctgtatgccacccaattgctcatattggcggtttcagctgttatcggctttttctttttcaccgacattcacgattttttaaagctgtggcatatacgtgacgataatatcatatggtacggtgtaactcttgccgtccttgtcatttttgccgatctggcggtgatgaaatggtgtccttcgcatttatatgatgacggcggcattaatgtattgctttttaagaacaggccggttctgcacattttgtttttgacgcttctcatttcgttcagcgaagagattttgttcagaggcgttctgcagacacatatcggcttatgggccgccagcttcatttttaccgtgcttcatttcagatacttggcgaagtggcttctgtttatgatggttgcgggcatcagtcttttgctggggcttatctatgaatggaccggcaatttattcgttccggttacagcgcattttattattgatgcggtatttgcctgtcagatccgttttcaatatgttaggaggggtttgcatgacggaaatgtcaagagttgaaagaagaaaagctcagcagcgtgccgagcagcaggttgccgcggccgcggatgaacaaattgaatatcttgaagacagcctcccgacaagacaatctgtaaaagaggagcgtaaaaaaaaggaagagcaggtgaaggaaaaaaccaaaacaaaaacgccgctgttcacttttctgaccgtcctgttcattatcgtaacaatcggtgtctttttcggtcttctttatatgacgaacagcagcagatttgacccgaaggactatgaagatgtcttcatagaccacagtgaaagcgcgcctgccgttattccgaaaggcgctcagaaagatacgtcagaaaccgctcttttagaacaaccgaaaaaaaagtctgacgacaaagataagaaagaagcggctgcatctgaaaaaacaaaagaaaaaccaagtgaaaaaacacctgaaaaaacggaaacgtcctcagaaaaacaagtaaagccgacagacaccgaatacgcggagacaaaacagcagtctccgccggctgtccgtgaaaaagcggctccggctgccgcaagtgatcaagctgggactgtcccgaaaaaagtgcggaccgtacagcatactgtacagccgaaagaaacgctttaccgcatttcaatgaaatattataaaagccgggcgggcgaagaaaaaatccgcagctacaacggattaaacggaaacgacgtgtacaccggccaggttctgaacattccgctgtctgattaaaataaatgcatgttttcaccgcgtttttcatatagtgtactaatgaaaacggacaaggtgtgaagcgcatggattctttatggaagcaattagaccgatttgctgacggaccgacgaaacaaatgcttcaggcgctggtgaaacggaaattaaaatacgaaaattatgccgcacaatgccgaagatggcagtgggcgtccctcgtttgtttttccctgatgtgcatactgctgatgtttaaaagctttaatgccccccaagcctctccgcagctgattctgcaggaaatattaggccatacggtttatttgtgctggattatggcttccgcttttgcgtattgcacttcttattattttaaaaaaaaggaagaaaaagctgagggtgaatttcataaactgagatgtgaaattatccaaaaaagcacggatttatggccccagcctgaaaaatggagggcgagagaatctgtttttcacttgatgaaacatcggtatgatatcaatctttattttgaaagcaaataaaatgaggcgttttccggaaaggatagaaacgtctttttttgtttgtccgtctaatgtaagacaatgacagaatggagagtgcgtttatgaagctaacagcgggaattctcggctcattggcgggagcggctgcggttatggcggccgtcatgtacaaaacggcaaacggcagccatctgaaaacacatacatttacgcttgataaaatgaaagggatgaagccgctcaccatcttctttatatctgacgtgcaccgccgtttaattgatgaaaagcttctccgcgaagcggcagtttataagccggatgccgttttgctcggcggtgatttggcggagggcggagttccttacgccagaattgaagaaaacatcaaacgtctgacggctctcgcgcctgtcatttatgtgtggggaaataatgattacgaggtcagccagcaaaaattgctctcacttttacgggcatacaaagtgattccgctgagaaatgaatcggttcagtttgcttataaaggggaaaccgttacgatctgcggggtggatgatatcaggatgatgatggatgattacgaagctgcaatcagatatacggatgctgataaagtaaaccttctgctttgccataaccccgacatccatgagcagatgagggagtcagacgggattgacgctgtgttcagcggccatacgcatggcggccaaatccgtttcggccggttcgggccgtacgaattgggcggggcgggaacggtaaaaaaagcgcattatctgatcagcaacggctacgggacgacaaaagttccgctgaggctcggggcgaagccggagacgcatatgattacgctgtgcgggccggatgagccgttttcctgaaacaaatccggccgcggtgataaaaaacggcattctgcttgtcttcccgctgtacacggtgtaaactgataacaaattaagaacctatgactcatttattcatatactgtgttatatgatttgtgtgcaagaagaggcaggagggaacattatgcggcttgagcgtctgaactataataagattaaaatctttttaaccctcgacgatctgactgatcggggactgacaaaagaagacctctggaaggactcgtttaaagtccaccagttatttaaagatatgatgaatgaagcaaatacagagctcggctttgaagcgaatggtccgatcgcggtggaagtatattctcttcaggcacaaggtatggttgtgattgtaacgaaaaatcatgacgcggacgcagaagatgacgaatatgacgatgattatatcgagatgcaggtcaaacttgacgaaagcccggatattatttatcagttccattcgtttgaagatatcattcagcttgccggaagccttcaccgcatcgggattaccggcggcaccgtctaccattatgagaaccaatactatgtaagccttgaagacctcggctcccgttccgccgaaggtgtcatcgcggtgctggctgaatacggacacccggcgacaattacgatttacaggctccatgagtacggaaaactcatcatggacggcaatgctgtggaaaccatccagaaacatttttcataaaaaagatttgaaacggcagctgttttcagcggccgtctttttttaagcgaaataatggaaaaatcattgtctttcttctatgcacggagatattgaaggtgtatactagtcactgaaagggagcatgagagaaacagaagattttaggaggttaactcaaatggcagccgatcgattcaccggtcataatgaagaagacaaacatgatgtattaaaatcaacccaaaccgtaatacataaagctctggaaaaattggggtatccagaagaagtgtatgaactgctgaaagagccgctcagattattaacggttaaaattcctgttcggatggatgacgggtctgtgaaaatatttacaggctatcgtgcgcagcacaatgattccgtaggtccgacaaaaggcggcattcgttttcacccgaatgtaactgaaaaagaggtgaaagcactttccatctggatgagtttaaaatgcggaattattgatcttccttatggcggtggtaaaggcggaattgtttgtgatccgagaaatatgtcattcagagagcttgaaaggctgagcaggggatatgtaagagcaatcagtcagattgtcggaccgactaaagacgtcccggcacctgacgtatttacaaactcacagattatggcttggatgatggatgaatattcaagaattgatgaatttaactcacccggctttattacgggaaaaccgcttgtactcggcggatcccacggcagggaatcagcgacggcaaaaggcgtcaccatctgcataaaagaagcggctaagaaaaaaggtctcgatattcagaacgcgcgtgtcgtcgtacaaggtttcggaaatgcgggcagctatctggccaagtttatgcatgacgccggcgcgaaagttgtcggaatttctgacgcgtacggaggcctttacgatccggacggtcttgatattgattatctgcttgaccgcagagacagcttcggaacggtgacgaagcttttcaatgacaccattacgaatcaggagctgcttgagctggactgtgatatacttgtcccggcggcgatcgaaaaccaaattacagaagaaaacgctgaccgcatcaaagcgaaaatcgtggtagaagcggcaaacggaccgacgacactggaaggaacgaaaatcctgacagacaaaggaacgctgctggttcccgatgttctggcgagcgccggcggtgtaacggtttcttatttcgaatgggttcaaaacaaccagggcttctactggagtgaagaagaagtcgaggaaaaactggaaaatatgatgataaaatcgtttaataatatttatgaaatgtcccaaaaccgccggattgacatgaggcttgcggcttacatggtcggcgtgcggaaaatggctgaggcttcgcgtttcagaggctggatataaaccaatcgtttgcataaacaaaaaaaatctcctatgataatataggagattttttatatgagtggaaacttatgatggaaatgccaatcgcaggagttgaaggacatgacagaagaaaaagcaattataataggcggaggtccttgcggattatcggcggctatacatctgaagcaaattggcgtgaacgcgcttgtgatcgaaaaagggaatgtcgtaaacagcatttataactatccgacgcaccaaacttttttcagttcaagtgaaaaattggagatcggcgatgtcgcctttattacggaaaacagaaaaccggtccgaatacaggctctctcttactacagagaggttgtcagaagaaaagagctgcgcgtaaacgcctttgaaacggtggagcgcgtaacgaaacaggaagacggccgttttcttgtagaaacgtcaaaagaccgctacctcactccgttttgtatcattgcgacaggatattatgatcatccgaattatatgaacataccgggtgaagggcttcctaaggtatttcattactttaaagaaggccatccttattttgataaagatgttgctgtgatcggcgggaaaaactcaagtgtggacgcggctttggaactcgtgaagtccggtgcgcgcgtcacggtgctctacagaggacatgagtattccccgagcatcaagccgtggattctgcctgagtttgaggcccttgtcagaaacggcacaatccggatggaattcggcgcttgtcttgaagaagtgacggaagatgaaatcattttccgctccggccgaaatgagacggtccggctgaaaaacgatttcgtatttgccatgacgggataccatcccgatcacggtttcctcgaaaaaatcggtgtgcagattgatgctgaatcaggccggccgtttttccgggaagaaacgatggaaacaaatgttgacggtgtttttatcgccggagtcattgcggctggaaataacgccaatgaaatttttatcgagaacggccgttttcacggcggcttgatcgcaaacgaaatatcaaaacggctgggtgcagagagcatatgatcattcatatgctcttttttaaaaaattgaaagatgtaaaaatatgaacaacatggtaccatagatataggaatataaaggaaagaggttgcctgatgtttgcaatcatctctgcaggaattgctcccggcattgcgctgttaagctatttttatttaaaagatcagtatgacaatgaacctgtacatatggtgctgaggtctttttttctcggggttgtccttgtgtttccgaccatgtttatccaatatgttcttgaaaaagagcatgtggggggaggaagctttttcgtttcgtttttgtcttcgggatttttggaagaatcggtgaaatggttcgttctgatgatcagtgtgtacccgcatgctcattttgatgagcattatgacggaatcgtttacggggccagtgtgtctttaggctttgccacgcttgaaaatattctgtatttattcggccacggcgttgagcatgcttttataagagcgcttctgccggtctcctgccatgcgctgatcggagtgattatgggattttatctcggaaaagcccgcttttcgcagaaaaaagcccgtgtcaaatggcttgtgatttcgctggccgtgccttcatgtctgcacggttcttacgattttattcttaccgccctcaatcattgggtatattatatgctgccgtttatgctgtttttatggtggttcgggctgcgaaaggcaaaaaaagcacgctccgtcaatatgatccaagtgtgaagaaaccgcgcatcgcgtgcggtttctttttttatgccttgatgagggataagaaggaaacggtgtataaaaatatccgcgtgacagacaatacgggtacactttaaattttgcagtaggaggcttgaagagatgaagtgcaaaggagcctttatggcatgtctcattctattttctttcgccgccgctttcttcgatcatcatgaaacggttcatgcgttttcaaatcaagtgattcaaagaggcgcgacgggtgatgatgttatagaattgcaggcccgtcttcaatataacggattttataacgggaaaatcgatggtgtttacggctggaccacatactgggccgtgagaaattttcaggagaaattcggcatgaagccggttgacggcctcgtcggggcgaaaaccaaacaggtgctgatttcaaaatcaaaatattaccgtgaatatgtaatggagcagatccaaaaagggaatacgttcactcattatggcaacgtcccattggaaaaccaaacaaaaccgagagccggagcgcagaagcctgcggaaacgaataagcctgctcaaaagccgcaaaacaatacaggcggtcagtcaaatcaaaagcaaaatacgacagcggctaatatgcctggcggtttctcaaacaacgacatcaatcttctggcgcaggctgtgtacggggaagcgcgcggtgagccgtttgaaggacaggttgccattgccgcggttattttaaaccgtattaaaagcccgttatttccgaatacggtggccggcgtcattttcgaaccgctcgcgtttaccgccgttgccgacggccaaatatacatgcagccgaatgaaagagcaaaagaagcggttcttgatgcgattaacggatgggacccttctgaaaacgcgctttattatttcaatcctgatacggcgacaagcaaatggatttggggacgtccgcagattaaaagaatcggaaagcacattttctgtgagtaaaagtacgcaaaatgaggtgttaacatgattagaggaatcattatcgctgttctcggtgtcgcgatcgccgcaaccggatactggggatataaagagcatcaggaaaaagatgcggtccttctgcacgcggaaaataattatcagagggcttttcatgaactgacgtaccatgttgatcagcttcacgacaaaatcgggacgacgcttgcgatgaacagtaaaaaatctctgtctccggcgctcattgatgtatggagaattacatctgaagcgcataacaatgtgagccagctgcccctgactctcatgccttttaataagacggaggagtttttatccaatataggagatttcagctataaaacatccgtccgggatttagaccaaaaaccgcttgataagaaagaatatacaacactgaacagcctgtacaaacaggcggagaacattcaaaaccagcttcgcagcgttcagcatctcgtcatgagcaaaaatttacggtggatggatgttgaaatggcgctcgcctctgacaaaaaacaaagcgataatacgatcgtcgacagctttaaaacagtcgaaaaaaatgtaggcgctttttctgaagacagcatcagccccacatttacgggagcaaatacagaacgaaaaggttttacgcatctgaaaggaaaacaaattacggaaaaagaagcggtaaaaatcgcacaacggtttgcgcctgatcataattattccattaaagtggtcaaaagcggccggaagacgaatcgcgatgtatacagtatccgcatgaatgacgcggatcacaaatcttttatctatatggatattacccaaaaagggggacatcctgtctatttgattcaaaaacgggccgtgaagaaacaaaagatcagcctcaatgaagcatctaaccgggctgtcgcgtttttaaagaaaaacggatatgaaacaaaaggtctcgaaattgatgaaagcgcgcaatataataacatcggcgtcttttcttttattcccgtggagaaaaacgtccgcatttatccggaagccatccgaatgaaagtggcgctggatgatggtgaagtcgtcggtttttccgcgcgtgattacctggcggcgcaccgcacgagaacgattccggctcccgctttgtcagctgatgaagcgaaagcgaagctgaataaaaatgttgaagtgcgggagacccggcaggcgctgatcacgaatgaactcggtcaggaagtgctttgctacgaaatgctcgggacgatcgggaaagacacgtatcaaatgttcattaatgcggacgacggaaaagaggaaaaaatagaaaaattaaaaagcgcagagcctatatataaagacctataaaaataaaggaggaaaggactaaaagtcttttcctttttttcattacatgctttaataaaagcataaataatgaaagagtgaaggccatgatagctgtcggagattatatttggattgaatacatagagaacaatgagcccaaaaaagcgaggagtaaagcagtaagcgttgaaaacggcgaactccacatctcatatcccgtcgatctggattcgggacggacggtctttttgcataaaggattggaaataacagcggaatttatggggaatggccaagtaccgtatcaatttaaaagcataattaaaggaaagaaaaaagaacccatcccgatgatcggattggacatcccccctcaggaggaaatgaagcggattcaaagacgccgatacgtccgtgcagacgcagtattggatgtatccgtcaaattggaagcgaaaaaaaccgcttttcaaacggtttcctctaatatcagcgccggcggaatcgctgttgtgatgcctgagcatatttccgcggaaccaggtgaaaagctgtatgtctcattttctcttcccggcaaggaaaatggggcggatataacggccgaggctcttacccagcggattttttatgatgaaaaggcggataaacaaaaaatgacgcttgaatttacagaaatcggccccgcagcacagcagcttttactccaatattgtatgcgcgcgcagctgcagcagagaagaaacagtctgtcggaataaacagcagcgcacttttccatactaatcctaatggaggtgcgcgtgtatgaaaacatttgaacgtctgctggtcaaattggtctgcattcagcttataattttgggcgcggtgcagtttttgcttcattatcagcctattgaaccttatatttcgaaagctgtgaaatatgagggagttgataaaatggagaaaaaagaatggattgaaacggtaaagcggtaaatcagctcaattttttcgccccttttccggcagttcatgatacaatccatagaggagtaaagagcaaggagagagattatggacaagaaattatcaattgcgatcgacgggccggccgctgccggaaaaagcaccgttgctaaaatagtagctgagaaaaaatcatatgtgtacattgatacaggggcgatgtatcgtgccattacatatacggcactcaagcagaatgccgatttaaccgatgaagccgcgcttacagagcttttgaagcgtacggaaattgagcttgtatccgctccggaaagacaaatcgttctcgtaaacggagaagatgtgacagaagaaatccgaaaagacgaagtcagcaaccaagtatccatcgccgccaagcataaaggcgtcagagaagaaatggtcaaaagacagcagcagctcggacaaaaaggcggtgtcgtcatggacggccgtgatatcggtactcacgtgctgcctgatgccgaagtgaaaatttttctgctcgcgtccgtagaggaaagagcgaagcgccgatatgaagagaataagaaaaaaggctatgacgtgaattacgagacgctcattgaagaaattgccagacgcgacaaactcgattcagagagggaagtttccccgctgcgcaaagcggaagacgcgattgaaatcgatacgacgtcactcagcattgccgaagtcgcaggaaaaattctggagatcgtcgaacagaaatcacgttaacttcgggcggagcgctttttaatttttttcaaaagacaagatgttattgcttgacaaaccagtccttttattagaagttaatactaataaaactttttattgatcattcaaaatcttttttggatgattctttaatacatattcggctgaaaagcggacattcacatgttcagctttcaaaccgtattaattaagctgtgtaggtttggaccaaggaggttattcaaatgacagaggaaatgaatcaaattgatgttcaagtgccagaggttggagatgtagtaaaagggattgtgacaaaggtagaggacaagcatgtagatgtcgaaattgtcaatgtcaaacagtccggaatcattccaatcagtgaattatcaagtcttcatgtagagaaagcatcggatgtcgtaaaagttgacgacgagcttgacctgaaagtaacaaaagtggaagacgatgctttgattttatctaaacgtgccgttgatgctgaccgcgcttgggaagaccttgaaaaaaaattcgacacaaaagaagtgtttgaagctgaagtgaaagatgtggtgaaaggcggtctcgtcgttgatatcggcgttcgcggcttcattcccgcatcacttgtcgaagctcatttcgtcgaggatttcactgactataaagggaaaaccctctctcttatcgtcgttgaactcgaccgtgataaaaaccgggtgattctgtcacaccgggctgtagtggaaaaagagcagacagccaaaaagcatgattttctccaaacgcttgaggttggaagcgtgcttgaaggaaaagtgcagcgtctgactgatttcggcgcatttgtcgacatcggcggaattgacgggcttgttcatatttcgcagctgtctcattcacacgtcgaaaaaccgtctgacgtggtggaagaaggtcaggacgtaaaagtgaaagtgctgtccgtagaccgcgataacgagcgtatttctttatctattaaagaaacgctgccgggaccttggagccagatcggcgaaaaggtaaaacagggagatgtgcttgaaggaaaagtgcagcgccttgtaagcttcggcgccttcgttgaaattcttccgggcgtggaaggacttgtgcacatttcgcaaatttccaataaacatatcggaacgccgcatgaagtgcttgaagaaggacagactgttaaagtgaaagtgcttgacgtgaacgaaagcgaagagcgcatttccttaagcatgcgtgagcttgaagaagcgccgaaagccgatcaggaggacttccgtcaataccaggcgaaagaagagccgagcaccggcttccagcttggcgatttaatcggagacaagcttaataaattaaaataaattggtgataaaacgtgacacgagcagaacgaaaaagagaacatataaatcatgcgctgtctaccggccaaaaccgggaaacggggcttgatgatattacgtttgttcatgtcagcctaccgaacctagcattggaaaaagtggatatatcaacgaaaatcggcggactcacaagcagttcgccgatttttatcaatgcgatgacaggcggcggcggacagcttacatacgaaattaacagatcgctggcaagagccgcgcgcaaagccggcatgccgctggctgtcggttcgcaaatgtcggctttaaaagatccctccgaacggtattcttacgagatcgtcagaaaagagaatccggacgggctgatatttgccaatttaggcagcgaggcggatgccgagcaggcaaaaagagcaattgatatgattcaagcggatgccctccagattcatttaaatgtgattcaggagatcgtcatgccggagggagacagaagctttaccggcgctctcggccgtattgagcggattgcggcggaagcgggagttcccgtttttgtcaaagaagtcggcttcggaatgagcagggagtcggcacggcagttatttgatgccggtgcggcagcagttgatgccggcggatacggcggtacaaatttctctaagattgaaaatatgcgcagagagaaggcgcttcaattttttaatacatggggaatttccactgccgcaagcttagcggaaatccactcgctctccgctgatcaatcaattatcgcatccggcgggctgcaaagtgccctggatgtcgccaaatcgattgccctcggcgcttctggcgcgggaatggcaggcactttcctgaaagctctcacctccaaaggagaagaggggctgtttgacgagatgacggtgcttttacaagagctgaaaatgattatgaccgccctcggatgccaatcggttgcccaattgcaaaaggcgcctttggtcataaaaggtgacacacatcactggctttctgaacggggaattgacacatcccgtttcagcagacgttaaaaggcatgcgaacccgcatgcctttctctgttttttacgattttctttttcggaattcaccgttttgttcaaggctcgtcgctcctttatggtgaattgaatcatcgcgatcagattccacccggcgggaggctttcagttttttctcctgtctgtcttttcccatttttatccgctcctttcaggcataattggtttaaaaaatgcgttcccgctccatactggtcagaggaggagcgattatggaaccgttttattattactggtcaatgtggtttttatggatacttgcgacttttatttttgccaaaacaaaaagccgtttttacgtatcagtctttattttgactaatatgatggcaagcatacatcagataacggcttattttacgctgaacgcggcatatgtcatgttttttgctgcggcatttgtttatgcgggaagcctcggcatgcataaacggctccgtcatattgtgattcatctgacggcggctgcggcgtacggctttatttttctttttgcattatatgaccctgtttggtttatcataaaacctgaatgggcagcggttatactgcttaccgttattacgctttctgttgaggggcggttccctgagaggctttgtctttttgttctcggcatgtgccagggggagttattgtatgctgcggtcatccgcaacattgcgggggcagcagccgtcggtgattataaatggctatcaggctgttcggcgggagtgattcttctcgtcgggctgactacatatgaacagcttgcggcgcgcatcagccaaaaaagcaaaaagcagggcaaaggagcgacaaaaatgtcttgaaaacagacggagactgttacatgaatacgaaacattttgaagaatacattgtgatctcagtgaaaactgatataataaatgagttaagcccttctgtttgaagggttcttttcatagcgaagatgattattaataaccggttgaacaattttttgtgaaaatgtaagcggctggattgaaaggaagggtactatgggtaaacctgtcgtagccattgtcggaagaccgaatgtgggaaaatccacaatctttaaccggattgcgggtgaaagaatttcaatagtagaagatacccccggagtgacgcgggaccggatatacagttcggcggaatggctgaattatgattttaacctgattgatacgggcggaattgatatcggagacgagccgtttctgacacagatccgccagcaggctgaaatcgccatggacgaggctgatgtgatcatctttatggtgaacggccgcgaaggtgtgacgtctgcggatgaagaagtggcaaaaatactgtaccggacgaaaaaaccggtcgtattagccgttaataaattagataataccgaaatgagagcgaacatttatgacttttatgcgctcggctttggagaaccgtatccgatttcggggacacacggtttaggattgggagatttgctcgatgcttgtgccgagcattttaaaaacattccggagacgaagtacagtgatgatgtcgttcaattctgcctgatcggccgcccgaatgtcggaaaatcatcccttgtcaatgcgatgctcggcgaagagcgggttatcgtgagcaacgtagccggaacgactagagacgctgtggatacggcgttcacttacaatcagcaggaatttgtaatcgttgacacggcgggaatgagaaaaaagggtaaagtatatgaaacaacagaaaaatacagtgtgctgcgggcgttaaaagccattgaccgctcagacgtcgtcggcgttgtgctgaatgcagaagaaggcatccttgagcaggacaagcggatcgccggatacgcccatgaagccgggaaagccgtcgtcattatcgtaaacaaatgggatgccgttgataaggacgagcgcacgatgaaagaatttgaacagaatattcgggagcatttccaatttctcgattatgcgccggtgctgtttatgtcggcactgacgacaaagcggattcatacactcatgcctgcgattattaaagcgagtgaaaaccactctctccgtgtgcagacaaatgtcttaaatgatgtcatcatggatgcggtcgccatgaatccgactccgacgcacaacggctcccgtctgaaaatttattatgcgactcaagtcgctgttaagccgccgagcttcgttgtttttgtcaacgatccggaactgatgcatttttcttatgaacgctttttagaaaaccgaatccgggacgctttcggatttgaaggtacgccaattaaaatatttgcaagagcaagaaaataaaaaggtgtgatacagagatgaaaaaagtggcaatgcttggagcgggaagctggggcactgcactttctttagtgctggctgataacggacatcaagtcatgatgtggggacaccgtgccgaattgatcgatcaaatcaacgaactgcatgaaaacaaagattacctgccgggtgtggagctatcaagttctatcatcgggacagccgatttaagcgaggctttaaaaggagctgacttcatcattgtggcagtaccgacaaaagccattcgggaagtgctgaaaaaggctctgccgtatatcccgaaacaatcgatttttgttcatgtcagcaagggaattgagccggattcgcttctccgcatttcagaattaatggaggaggagctgcctgaggagtacagaaaagacatcgtcgtgctttcagggccgagccacgctgaggaagtcggattaagacacccgacgactgttacatcatcttcaaaaaatatcaaggctgcagaagcggttcaggatttattcatgaaccagcatttccgcgtctatacaaatcccgatatgatcggtgttgaaatagggggagcgttaaaaaatatcatcgctcttgcagcggggattacagacggattgggatacggagataatgcaaaagcggccttaatcacccgaggtcttgctgaaatcgccagactcggcacaaagatgggcggaaatccgctcaccttttccggcctgaccggcgtaggcgatttaatcgtgacgtgtacaagcgttcattcccgaaactggcgcgccggcaacctgctcggcaaaggatataagctggaagctgtcctggataagatggggatggttgttgaaggcgtgcggacgacgaaagctgcgtatcagctgtctcaaaaatatcaggtgaaaatgccgatcacagaagcgcttcaccaagtattatttaatgggcagaaggtagaaacggccgtagaatccttaatggccagagtgaaaacccatgagatggaagacttggtcaacacattcgaaaaccgggtgaagtgacaataacatgccgtcagcatattctgaagtgacgaaagtccaaaacgcagaactctccggctgaaatcgcttaaaacatttgctgatttaggcagaagaggatgcagacgtacgcatctacgcatactatagcatcgaagtccaagagagtgtatctcagacgtacaggtgaatatagtcaacttgactgaagcaaagtccccctctttgcttcagtttttttgttttttcaatagatggaaaacctgttgatcttttcaacatttgtatattaaaatgaaatataacgcttacaatgatgggacggggggcacgaacgtgagtgtggcattgatgaaaatgtggtttgcgcttggtgctatgggattaatgtttgttgcggtcgcctttatttatgtcagcaggtacaaagtgaaaaacaaactgataaaagcagcggtttcttcactcgcttatgcctgcatggtcatctcgggattgatcgtgttaatggtcgttttcagcgggcctgtcaatgaataaagccaaaagggggcgcggaatgcataagttaaaaatggccgtcataacggcaatggcggtgcttctgctgtcgggctgtctgtaccctgaagcaaaaaaaactgaaaataaagtatcttacaaacatcagcttcagcaggtgcaagcggcagtggatgaatttaaaaaggcgaacggcggacttctgccgattcagacaaaagatatgaaaacaccgctctatcaaaaatatccgatagattttaagcggctcgcgcccagatacatagaggagccgccggcctcagcttatgaaagcggaggaatgtaccaatacgtgcttgtcgatgtggaaaataagcctaccgtcaagctggtcgatctccaaatggcggaagcaatccgcgacatgaagctgcgtgtcaaaatgtatcaggaaaagcatacatatcctccctatgaggacgctgtttcaaaaggcctgttcactttaaataaaaaaaagctcggcatgaaagactctccttcagtcaaaagtccggtttcaggcacgtctctgccgcttttaatcggcgctgacggagaaatctatgccgactatcgcgtcgatctcgcccgctgcctgaaggaaaacaaaaagaaaatcaaaccgggcgcggaaattcaggatattttatggaaagagactcctttcgtcccggccttttcagtcacttacaccgtaaatgaaaaacaggaacccgtttttttagaaagtcaaacgaaacaggaatgaacctttttcccgcgcatacaaatagggagaaaggtttttttgattttgatagaaaagactgcctgaaaattttctaaagatgtcatattgaaataggacaacgtcatacacatatagtgtcctgtatttgattggagaatggtgaatgaaaaatgataaggataggaagtccgggaggggatcacttggaaaaggtcgatattttcaaggatatcgctgaacgaacaggaggcgatatatacttaggagtcgttggcgctgtccgtacagggaaatctacattcattaaaaaatttatggagcttgtggtgctcccgaatatcagcaatgaggccgaccgagcgcgggcgcaggatgagcttccgcaaagcgcagcaggaaaaacgataatgaccacagaaccaaaatttgtcccgaatcaagccatgtccgttcatgtcgcggaaggacttgatgtcaacatccgtcttgtggattgtgtgggatatacggttcccggggcgaagggatatgaggatgaaaacggtccgagaatgatcaatacaccttggtatgaagaaccgattccctttcatgaggctgcggaaatcggtacgagaaaagtcatccaggaacactccacaatcggggtcgtcattacgacagacggctcaatcggcgatattgcgcggggcgattacgtggaagcggaagaaagagtcatcgacgagctgaaggaagtcggcaaaccgtttattatggtcatcaactcggtaaaaccgtaccacccggaaacagaagcgctcagagctgaattaagcgcgaaatatgatattcccgtcctcgccatgagtgttgaaagcatgcgggaaacagatgtgttaagcgtcctcagagaagcgctttacgagttccctgtgctggaagtcaatgtcaaccttccgagctgggtcatggtgctgaaagaaaatcattggctcagagagagctaccaggaatcagtgaaagaaaccgtaaaagatattaaacgcctgcgcgatgtcgaccgggttgtcggccacttcagtgaatttgagtttattgaaagcgccggattggccggaatcgaacttggccagggtgtcgcagaaattgatttgtatgcgccggatcatttatatgaccagattttaaaagaagtggtcggcgttgaaatccgcgggaaagaccacctgcttgaattaatgcaggacttcgcccacgcgaaaaaagaatatgatcaggtatcagatgcgctgaaaatggtgaaacagaccggctacggcattgccgccccggccttaaccgatatgagccttgatgaaccggaaatcatcaggcagggatcaaggttcggagtaaggctgaaagcggtcgctccgtccattcatatgatcaaagtggatgtggaaagtgaattcgcaccgatcatcgggacagaaaaacaaagtgaagagcttgtccgctacttaatgcaggactttgaagatgatccgctttctatctggaattccgatattttcggcagatcattgagctctatcgtaagagaaggaatctccgcaaaactgtcactcatgccggaaaatgcgagatacaaactgaaagaaacgctggagagaattattaacgaaggctcaggcggcctgatcgccattattttgtaagctgaaggacctcttcctgaaacggggggtctttttttattctttttagatactggaaatcaatcaaggattaggaggaaaaaagcaaaaaaaggaatatttgttcggtaaaacacgtgaaaaccttgacgagcaagggattgaggctttaaaatgcttgatatggctttttatatgtgttactctacatacagaaaatcttcactttgttggacaaacattcctcaaagtgtctgttttcttatgaaaagccgtttacttgtctgttcttccctgctttgattttttatcagacaggtttagaatcaggctgaactgtgaagaaatgataataaactgctgatttgatacccttttgggaggaggtgaaaggcatgaacaagacagaactaatcaatgcggttgctgaagcaagcgaattgtctaaaaaagacgctacaaaagcagttgattctgtttttgatacgattttagatgcacttaaaaacggtgataaaatccaactgatcggtttcggtaactttgaggtgcgcgagcgttctgcacgtaaaggacgtaacccgcaaacgggtgaagaaatcgaaatccctgcaagcaaggtacctgctttcaaaccaggtaaagctcttaaagacgctgttgcaggaaaataattgtgaatatagatcgtgtatgcatctgatacatacactttgtttcttcacagaaaagccccttgataaaggggcttttcatatttaagcagccccggtcaccgggcaggactttcgttttgcttttggcgcggcaaatgtgctagaatcgaaattaaatgtattcaatggtggaggacacagacaatgaaagaagttaataaagaacagattgaacaggcggttcgccagattttagaggcgattggagaagatccggaccgggaagggcttttagatacgccgaaacgcgtggcaaaaatgtacgcggaagtattctcgggattaaatgaagacccgaaagaacactttaaaaccgttttcggagaagagcatgaggagcttgttcttgtaaaagatatcgcgtttcattccatgtgtgaacatcaccttgttcctttttacggaaaagcgcatattgcctacattccgcgcggcggcaaagtgacgggcctgagtaaattggcgcgggcggtggaagccgtctcaaaacgcccgcagctgcaggagcgcattacttcaacgattgcagaaagcatcgtagagaccttagatccccacggcgtcatggttgtcgtcgaagctgagcatatgtgcatgacgatgaggggcgtaagaaagcctggcgcaaaaacagtgacttccgctgtaagaggtatttttaaagatgacgcagcggcgcgttccgaagtgttagaacatattaaacgtgcggattaataatgatagagggtgcagatatgaattcaaagcattcaagtgattttgtcgtcattaaagcggtcgaggacggcgtgaacgtcatcggtttaacgagaggtacggatacgaaatttcaccattccgaaaaactggacaaaggcgaagtgattatcgctcagtttactgagcatacctctgccatcaaagtgagaggcaacgccctcatccagaccgcttacggagaaatgaacagcgaaaaaaaataagccggctgtttcccgcttttgccaattgcccgcaaacggcgggagaatacagccaatttcttttttttatgctataatgatacctgcgtataataatgacgagtaaatctcatacatattagaataaatgtgaatttggggacaagggtgatatttttgcaagacatctacggaactttaacgaatctaaatacgaaattaaaacaaaagctgtctcatccttatttagcgaaacatatttccgcgcctaaaatcgatgaggataagcttcttctttttcacgctttgtttgaagaggcggacattaagaacaacgacagagaaaattacatagtaactgcgatgcttgtccaaagcgcccttgatacccacgatgaagtgacaacagccagagcgttaaagcgagacgaaaataaaaaccggcagctcaccgtgcttgccggcgactatttcagcggactgtattattcgcttttatctgaaatgaaggatatctatatgattcggacgctcgctacggcaattaaagaaatcaatgagcataaaatccgtctgtacgatcggtctgtcaatgacttgaatcaattgatcgaaagcatggcgattgtggaagcggccctgtttcacagagtgtcagaccactttaatcttccgcgctggaaagagctggcgagtgatttttttgtatataagcggctgatgaacggcaatgctatatttctcgatgtcatcggcaatattgtaaagtcagggaaatcaaaggctgacataatggaagatagcttccgaaaggcaaagcaaagcattgaaacgctgctgccgctcaattcaccaatccaaaacctcatgctgaaccggctcaaagcgatcagccaggacaaaacatatcatcagaaagtggaagaagggtaatcaacatgcaggagtcaaaagaacagcgcgtacacggcgtgtttgaaaaaatctataaaaattatgaccaaatgaactctgttatcagttttcagcagcataaaaaatggcgcgataaaacgatgcagatcatgaatgtaaaagaaggcgcaaaagcgcttgatgtctgctgcggaacggctgactggacgattgccctcgcagaagcagccggaaaaagcggcgaaatcaaaggactggatttcagcaaaaatatgctgagcatcggcgagaaaaaagtgaaagagggcggttacagccaaattgagcttttgcacggaaatgcgatggagcttcccttcgctgatgattcttttgattttgtcaccatcggcttcgggctgcggaacgttcccgactatctgaccgtgctgaaagaaatgcggcgggtcgtcaaaccgggcgggcaggttgtatgtctggaaacatcccagccggaaatgttcggattcagacaggcatattttctatattttaaatacatcatgcctttcttcggaaaaatgtttgcgaagagctataaagaatattcttggcttcaagaatcggcaagagaatttcccggtatgaaagagcttgcgcgtctgtttgaagaagcgggcctgacgaatgtcaaataccattcgtttaccggcggagtggccgctacgcatatcggttggaaatgatgaatatacagatgtttgggtgaatgatatgaaatttaaaatggcctattcttttttaaatgacgatattgatgtgatcgaaagggaacttgagcaaacggtgcggtcagactatcccttgctgagtgaagccgggctccatctgctccaggcgggaggcaagcggatccgccctgttttcgtattgctttccggcatgttcggcgactatgacattaataaaataaaatatgttgcggtgacgctggaaatgattcatatggcgtccctcgtgcatgacgacgtcattgatgacgccgagctgcggaggggaaaaccgaccatcaaagccaagtgggacaaccgtatcgccatgtataccggtgattatatgcttgcgggctcacttgagatgatgacgagattggatgagccgaaagcccaccggatcctgtccaaaaccatcgtagaagtatgcctcggagaaattgaacagatcagagataaatacaatatggaacaaaacctcagaacctatttgcgccgcatcaaacggaaaacggctcttctcattgccgtcagctgccagctcggcgccatcgcttcgggagctgatgagaagattcacaaagcattatattggttcggctattacgtgggcatgtcctaccagattattgacgacattcttgatttcacttcaacggaagaggaactgggaaagccggtcggaggggatctgctgcaaggaaatgtcactctgcccgttttgtacgcgctccgtcagcctgaattgaaaaatcagctgaaattaattaacagtgaaacaacacaggagcagctcgcccccattattgaaaatattaaacgcacagacgcaattgaaaaatcaatggccgtcagtgacaggtacttaaaaaaagcgtttgaaaaactgaatacactgccgagaggacgggcgcgctcatcattggccgccatcgccaaatatatcggcaaacggaaattttaaattccttttacgaacaagatgtgaacattctccgccctggattgattaattgtcagaaagatgttacgatttcggtgtgcaacttgaaagcctatacataatgatggggtggagaatcttatggaaaaaacttttatcatggtaaaaccggacggcgtacagcgccagctgatcggagagattttatccagatttgagcgtaagggcttacaattggcaggagccaagctaatgcaagtttcagaacagatggctgaaaaccattatgctgaacataaagggaagccgtttttcggcgagcttgtggaattcattacatcaggacccgtatttgcaatggtatgggaaggggaaaatgtagtagagatcacaagacagctgatcggaaaaacgaacccgaaagatgcactgccgggcacgatccgcggtgactacggcatgtttgtcggcaaaaatatcattcacggttcagactccttagaaagcgccgagcgggaaattgacattttcttcaaacgggaagagcttgtaccgtatcaaaaattaatggccgactgggtgtactaagccgtcagcctttctttttctcttgttatgaaaaggtttacatattttaagaaagacagaggctgcgctgccctgtcttttcatttctcacaaatcagcctgcgggctgatttttttattgaaatcgtacaaattagaaagaaaacaggctatactaggacaaaagacagcgagattgggagagaagcaatggagccttacgaaatttttatcaccaagtggaaacaaataaccggcgttgatttatctttatacaaagaagcacagatgaaaaggcggctgacgtccctttatgaaaaaaagggattcaaagattttcaggaatttgccgccgctttggagaaagacaagcttttattaaatgaaacattggacaggatgacgatcaatgtttctgaattttaccgaaattataaacggtgggaagttcttgaaacctcaattcttccgttaataaagcataacaaaccgttaaaaatatggagtgcggcctgttcaacgggggaggaaccctatactttggctatgattctcagtcagcaggcgggtttggccggatttgatatattggcgacagatattgatgaaaaggcgcttggcaaagccaagcggggcatctatcaggaacgctcgctgcaagaggtgccggcttccgtgaaaagccgttatttcaccaagcaggctgacaacagttatcaagtaaaacaagagattcaaaaaaacatccggtttaagcggcacaatctgctcgccgacagctatgaacaggattttgatctgatcgtctgccgcaacgtctttatttattttactgaaaaagcaaaagaagagctgtatgtaaaaatggcgggcagcctgaaaaagaacggaattctgtttgtcggaagcacagagcagattttcagcccggaaaaattcggccttgagagcactgatacatttttttatcaaaaaagatagaagacatttaatgaaaacttgtggtatagttttacttaaaagcgttaatgcgatgaagggagaagaaagaaatgagatacttaacagccggagaatcacacggcccgcagctgacgacaattatagaaggtgtgcctgcggggctttatataactgaagaagacattaattttgagcttgccagacgtcaaaaagggcacggccgcggacgccgcatgcagattgaaacggacagggcgaagatcacaagcggcgtgcggcatgcccggacactcggttcacccatcgcgctcgttgtagagaataaagattggactcactggacaaaaatcatgggcgccgcaccgattacagaagaagaagaaagtgaaatgaaacgtcagatttcaagaccgagaccgggacacgcagatttgaacggggctattaagtataatcaccgtgatatgagaaatgtgttagaacgatcttccgcgcgtgagacaacggttcgcgtggctgccggagccgtcgctaaaaagattttagcggagcttggcattaaagtcgccggacacgtcctgcaaattggcagcgtaaaagcagagaaaaccgattacacatccattgaggatctcaaacgggtaacggaagaatcaccggtgagatgctacgatgaagaagcaggccgtcaaatgatggcagccattgatgaagcgaaggcaaacggcgactcgatcggcggaatcgttgaagtgatcgtcgaaggtatgcctgtcggtgtcggaagttatgtccactatgaccgtaagctggacagcaagctcgctgcagccgttctgtcgattaacgcgtttaaaggcgtagagttcggcatcggttttgaagcggccggcaaaaacggcagtgaagttcatgatgaaatcgtatgggatgaagagaaaggctatacacgcgccacaaacaggctcggaggattagaaggcggtatgacgacgggaatgccgattgtcgtccgcggcgtcatgaaaccgatccctactttgtataagccgctgaaaagcgtcgacattgaaactaaagaaccatttacagcgagcattgaacgttcagacagctgcgcggttccggcagcaagtgtagtggctgaagctgcagtggcctgggaaatcgcaaatgccgtcgtagaacaattcgggcttgaccagatcgaccgcattaaagaaaatgttgaaaacatgaaaaaactatcgagggaattctgatgaaagagcttgaggttcggacagcttcctccgcatatcccgtgtatatcggtgaaggcataaggaaacaggccgctgctcttttgtcttcactgaacaggccgctgacaaagatccttctcgtcatcgatgctgaagttgaccggctttacggcgatgagatgttccggcttttaaacgaaacatggcccgtgaaaaaagtaatcgttccaagcggagaagaagcgaagtctctaaaagagtatgaacggattcaaacggaagcgatcgctttccatatggaccgctcctcatgtatgatcgccttcggaggcggcgtgacgggtgatttgaccggcttttgcgcagcgacttttatgcgaggaattgatttcattcaaatgccgacgacactgcttgcccatgacagcgcggtcggcggcaaggtggccgtcaaccataaactcggaaagaacttaatcggcgcgttttatcagccgaaagcggtgatttacgatacggagcttctgaaaaccctgccggaacaagagctgagatcgggcatggctgaagtgatcaaacacgcgtttatcgccgatcatgcttttttagaaaaacttctcacgtttgacacgttgcaaggactgacaagcgctgagctgaatgaaatgatttataaaggaatttcaatcaaatcggccgtcgtgcgtgaggacgaaaaggaagagggcataagagcttttctgaatttcggccatacgctcggccatgccgttgaggcggaatacggctacggccggattactcatggagatgcggtcgccctcggcatgcagtttgccctttacgtgagtgaacaggttgcgggttgcaagatgaacaggaaagaactcacacaatggctgattgggctcggctacccgggaagtatcagacaagatattgaaacgccggttctctccgcccggatgatgaatgataaaaaaacgcgcggaggcatgacacagttcatcgtgttaaaggaattaggggaagcgcgggactgcatgctttcaaaagatgagctcgaaaatttgctgaacaaatggcgaatggaggaaacagcatgatgatacgcggcattcgcggagcaacaacggtggaacaagacaccgaacaagaaattttagaaaaaacacagcagctgcttgaaaaaatcattgaacaaaatggatgcaagccggaagacgttgtacagatcctgttatccgccacgcctgatatccattccgtatttccggcaaaagcggtccgccgcctttccgggtggcagtacgtcccggtgacgtgcatgcaggaaatggatgtcaccggcgctctgcaaaagtgtatccgtgtcctgatgacggttcagacggatacgcctcaggatgaaatcaagcatgtctatttagaaaaagccgttgtgttaaggccggatttatcattgacaaaaaatactgacatgtaatacgataaacaaagcttagaaatacacaagagtgtgtatagagctggtaagtaagatattgaacagttgagtttagaatagggtagcagagaatgagtttagctgagctgagataaacacgtttttattctgcccaaaagaagcctttcttttgggtttatttcttatacgcaagactcctctcactcttcatctcattctccttaccgtaaggaggagaatcatgaatttacaatcggatgtttctttatttttaaaggacagtctgacacaccgcaccattccaatcgcagagacttttacggtcgacacgatcacacccattcagatggttgaaaaactggacagaaacattacgtatcttttagaaagcaaggatgagtcgtcaagctggtcgagatactcttttatcggcctcgatccttttatcacgattaaagagagtcatcacacattcactgccgctgatccaaacgggcatacgctgtttgaagccggagaattaaaagccgtgcttgattggatgaatgaaagcttccgcattaaaacacccgagcttgatatcccgttttcgggaggggccgtcggttatctgagctatgacatgatccctttgattgagcctaccgtgccgagccacgcgaaagaaacagatttcgaaaaatgcatgctgtttgtctgccggaaaatcatcgcgtacgaccacgaaacgaaacaagtgcatttcattcaatatgcggcgcttaacggccgggagacggaggaagaaaagcgggccgtttttaaagaaaattgcgcggagcttcgtaagcttatcggtattttgacagaaccgaaagatatgaaagagccgtttttttctaaagaaacatttgaaacgccaagttttgccgatatgacatctaattatacgaaagaagagtttatggccggcgtcaataaactgaaagaatatataaaagccggagacatttttcaaggggtgctttcgcaaaagtttgacattccggtatccagacattcatttgagctgtacagggtgctccgcatcgtcaatccttcaccttatatgtactatatcaaactgcctgacagagacattgtcggaagttcgcctgaacgtctgatccgcgtggatgacagacacctggaaattcatccgattgccggaacgagaagaaggggcgccggaaaagaagaggacgatcgcctcaaaaaagagctgatgaatgacgaaaaagagaaagctgaacattatatgctcgtcgatcttgcgcgcaatgacatcggcagagttgcggagtacggttccgtagccgttccggaattcacaaaggtcgtttctttttcacatgtgatgcacatcatctctgttgtaaccggccgtttaaaacagggcgtccatccggttgatgcgctgatgtcggcattcccggcaggaacactctcgggcgctccgaaaatccgcgcgatgcagcttttaaatgaattagaaccgacttccagagaaacctacggcggatgtatcgcttatatcggatttgacgggtcaattgattcgtgtatcaccatccgcaccatgagtgtcaaaaacggtacggcgtcggtgcaggcgggcgcgggaatagtcgctgattccgtcccggaagccgaatatgaagagagctgtaacaaagcgggggcgcttttaaaaacgattcaaatcgcagaagacatcttttctggcagggaggagaagacggatgaacaaatttctgcaatcgtgcgttaatggccgcacgctgaaaaccggagaagccgaaaagctgatggagatgatgatgaacggggccatgtcgcagtctgagatcggggggattttatcggtattagcccaccggggtgaaacggcggaggagcttgccggatttgtaaaagtgatgcgggcgcgggcacagacggcgggtggcttggcggatgtcgttgatacgtgcggaacaggcggagacgggatttctacgtttaacatatccacggcagcggcgattacagcttctgccgccggagctaaagttgccaagcacggaaatcgctccgtttcgtctaaaagcggcagcgcggatgtgctggaaaagctgggggtttccattcaagccactccagaaagcgtcaaacgcagcattgaaatgaaacaaatggggtttttgtttgcgccgctgtttcattcgtcaatgaagcacgtcgccgccgcaagaaaagagcttggcttccgaaccgtatttaatctgctgggcccgctcagcaacccgctgcaggtgaagcggcaggtgatcggcgtctattcatttgataaagcgcgcctgatggcaagcgctttggaacaatttgatgtcagacacgtcatgcttgtgtcggcgcgtgacggattagatgaactgtccatcacagcaccgacagatatcattgagctgaaaaacggtgaacgtctggaatattccgtttcacctgaacaattcggttttgcagaaggttcattgaaggatattcaagtgagttcatcggaagaaagcgcgcttctcattcagaatatttttgcaaatagagctccgtcatccgctctgcatattaccgccttaaatgcgggcgcggccatttatacggcaggtcttgcaaacgatctgaaagaaggaacgaaaacagccttagaagccattcaaaacggagatgccaaaaggcagctcgaacgtctgaaacagaaagaggaagaaatgtatgcttgatcaaatcattctgcagaaaaaagaagaaatcaaatccatcgtgctgccggaaacctgtcaaattgaacggagatcctttaaagaagcgctcctgaacccgaaccgttttatcgggctgattgccgaagtgaaaaaagcttcgccgtctaaaggattgattaaagagcattttgttccggaaacgattgcggcggattatgaagcggctaaagccgacgccctttcggttctcacggatacccgtttttttcaggggagaaatcaatttctgacagatgttaaacaaaccgtgtctcttcccgtgctgagaaaagattttattattgattcccttcaggtggaggaatcgttcaggatcggcgccgatgccattttgctgatcggggaagcgctggaacctccaaagcttcatgagctttatctggaagcccgcgggaagggcatggacgttctcgttgaagtccatgatgaaactgtgcttgaacggattttacaagtgtttcagccggacattctcggcataaacaaccgggacttaaaaacgttccgtacttctgtttcgcaaacggaaaaaatagcgcagcttgtgccggacggctgcctgctggtcagcgaaagcggcatcggttctttggctgacctgcaattcgtcaacaagcacggggcgcaggctgtattggtcggagaatccttaatgagagaggattcgcagcaaaaggcgatccgcggactgttcggagagtgacgatatgaaaaagcctgagttaaagtactgcggaatacgatcgaagcgtgattatgaacttgcggcagcttcagaagcggattatctgggatttatttttgccgcaagcaaacggagagtaacgccggatgaggtccggaaatggaaagagcaggtccggacagacaagaaacatgtcggagtatttgtaaatgaaacgatagaaaacatcgcgcaaatcgcatctgatctggcacttgacgtcatccagcttcacggtgatgaatcgcctgaggatgcccttcgcctccgtccgcttgtgcgctcggaaatatggaaagcgctccatcacggggaagggacgctccgtcagatggctcaatttacacctgctgtcgacggctatgtcattgattcttcagtgacaggaatgagaggcgggacgggaatcgcgttttcatgggcccgtgtccccttgtaccgaaagcaggctcaaaatgcaagcaagcgctgttttattgcgggcggtgttaatcctgaaacgattaccggcttactgagaacgcgtccgtgcggtatagatcttgccagcggaattgaaaaaaacggacacaaggatcaaacactgatccggcttttagaagaaaggatgaaccactatgtatccatatccaaatgaaatcggaagatacggcgaattcggcggcaaatttgtccctgaaacattgatgcggccccttgaggaaatcgaaacggctttcacagaattaaaaaatgatcctgtttttcatgccgaatataaaaaactattgtttgattactccggaagaccgactgcattaacgttcgcagacagggtgtcagagtatttgggaggggcgaaaatctatctgaaaagagaagatttaaaccataccggctctcataaaattaacaacgcgttaggccagattctgcttgctaaaaagatgggcaaaacgaaaatcatcgccgaaaccggtgcgggacagcacggtgtggctgccgcgacagccgccgcaaaattcggttttaaatgtacggtttttatgggtgaagaagacgttgcgcgccagtcgctgaacgtattccggatgaaactgctcggcgcggaagtggtgccggtcacaagcggcaacggcacgctgaaagatgcgacgaatgaggcaatcaggtattgggtccagcattgtgaagatcatttctatcttatcggttctgtagtgggtccgcacccatatccgtatatcgttcgcgaatttcagaaaatcatcggcgaggaagcgaaagaacagctccgccgggttgaaggaacgctcccggacaaggttgttgcatgtgtcggcggcggaagcaatgcgatgggcatatttcaggcctttttagacgaagacattgagctgatcggcgccgaggcggccggaaaagggattgatacgccgctgcatgcggcaacgatcgcaaaagggacgctcggggtgattcacggatcaatgacctatttaatacaagatgaatacgggcagattatcgaaccgtattccatttcagcaggccttgattacccggggatcggccctgagcacgcctatctgcacaaaagcggccgtgtaacgtacgaaagcgtgacagacgatgaagcgattgccgcgttacgtctgctttctgaaacagaaggtattcttccggctattgaatctgcccacgccctggcaaaagcgtttgaaatggcaaaggacatggataaagacaaaatcattctcgtcagtttgtcgggaagaggagataaagatgttcatacgctgatgaatgttttggaaaacggggtggagacacatgtttaatctgcgagattctgaaaaattgtttatcccttttatcacagcgggcgatccgcttcctgacatttctgttgaactggcaatatcattacagaatgcaggcgcttctgcccttgaaatcggcgttccttacacagatccgcttgcggacggacccgtcatacaacgggcttcaaaacgggctctggaaaacggaatgaatatcgtaaaagccattgaacttggcggcaaaatgaaaaaaaacggcgttcatattccaattatcctctttacgtattataatcctgtgttacaattagaaaaagaatactttttcgctttactgcgggaaaacgacatagacggcctgcttgtacccgaccttccattagaggaaagcgcccttttgcaaatgacatgcaaaaaggagaacatcgcttatatctcgctggttgcgccgacaagtgaagaccgtttgaaaataattactgaacaggcctgcggctttgtgtattgtgtatcctctttaggagtgacgggcgtacgcagcgaattcgatccgtctgtatactctttcatccgtaaggtgaaagaattcagctctgttccggtggcggtcggttttggcatttcaaaccgcaaacaggttgacgggatgaatgaaatatctgacggtgtcgttgtcggcagcgcgcttgtcaaaaaagttgaagagcttaaaacaaagcttgtgaatcccggcacaagagctgatgcgcttcttgaatttgaagaatacgcgaagacgttcggacgactgtacagtgtaaaatgaggtgactggatttgcagattaaagaacagctgcggcagctgaaaccgtatcagccgggcaaaccaatagaagaagtgaaaatggaatacgggcttgaaaaagtagtaaaactcgcttctaacgaaaatccgttcggctgttcacaggccgcaaaagatgcgctgcatcaggagattgagcagcttgcgctgtatcccgacggttacagtgccgctttgagaacgcggctcagtgagcatctgcaggtcagtgaatcttcgatcattttcggcaacggctctgatgagctagtgcagattatctgccgttctttattaaatgatcaggcaaacacgattaccgccgccccgactttcccgcaatacagacacaatgcggtgattgaaggcgctgaggtgcgcgaggtgccgctccgcagtgacggcgctcatgatttagaccggatgctggaagcaattgacggcgagacgaaagtcatatgggtatgcaaccccaataatccgacggggacatatacttctgagcaagagttaattgcctttttaaacagagttcccgagcatatactcgttgtacttgatgaagcgtactacgagtatgttacggcggacgattaccctgaaagcatcccgcttttaaagcaatatccgaatgtcatgatcctccgcaccttctctaaagcgtacggacttgccgcgctgcgtgtcggatacggcattgcggacgaagcgctgatccgccagattgaaccggcgagagagccgttcaatacgagcagaatcggtcaggcttcggcactggcagcgcttgacgaccacacatttattcaggaatgcgtcgagaaaaataaagcgggccttaagcagtattatgattttgcggaaactcacggattaacttgttatccttcacaaaccaactttgtgctcattgattttaaccgtccggcggatgaactgttccaagccctgttggaaaaaggatatatcgtccgttcaggacaggcgctcggatttccgacagcgttaaggattacggtcggtacgaaagagcagaatgaggaaattctcacaatcttagctgaaatattataagaggtgatcaagcatcacctctttgctctattaaaatagttgaaaaaggaaatgagtgaaatgaaggatactatattgcttgcggggatcgggctgatcggcggatcgatcgcattggccatcaaaaaggagcatccgcataaacggattatcggtgtggatatttcggaagaacagctcactgccgcgctgaagctcggaattattgacgagcgggccggctcattgacggaaggggcgcagcaagcgtctgttgtcattatcgccacgcctgtcgcccaaacgctgaaaatgctcgatatgctggccgcatcagacatcacccatgaactcctgattacggatgtgggcagcacgaaacagaaagtcgtcagctacgccgacaaagtgcttccggctcattatcaatttgtcggcggccatccgatggcggggtctcataaatccggggccgctgccgccaaagaatttttattcgaaaatgcgttttacattttaacacccggaaaatcaacttctaaagagtcagtaacgcatctgaaggagcttttgaaagcggcaaacgcccactttgtggagatgactcccgaggagcatgacggcgtaacgagcgtcatcagccatttccctcatatcgttgctgcaagcctcgtccatcaggctcatcattctgaagaaaattatccgtttttgaagcgtttcgcagccggcggttttcgggacatcaccagaatcgcctcaagcagtccggcgatgtggagagacatacttcttcataacaaagataaactgcttgaccgcttcaaagaatggaaacgggagattgacacgatcgaatcttatgtagaaaatgaagatgcggacagcctgttcggatattttaaaaaagcgaaagattatcgcgacggcctgccgctccgtcaaaaaggagcgatcccgtccttttatgacctttatgtcgatgttcccgatcatccgggggtcatttcggaaattacggcgatactggcagaagaaaaaatcagtatcaccaacatccgcattatcgaaacaagagaagatattaacggaattctcagaatcagtttccagactgatgatgaccggaagcgcgcggaaacctgcattcaatcccgcgccaaatatgacacattttacgctgactgaggtggaaaacattgaaaagagaaaaagtgacgtctttaaacggtgaaattcatattccgggggataaatccatctcccaccgttctgttatgttcggagcgcttgcggaaggaacgacaacggtaaaaaactttttgcccggagccgattgtctgagcaccattgcctgcttcagaaaaatgggtgtctccattgaacaaaacggaagtgatgtaacgatatacggaaagggcattgacgcactttgtgagcctgacagccttcttgatgtcggaaattccggcacgaccatccgcctgatgctcggcattttagccggacgcccatttcacagtacggtagcgggtgacgaaagtattgcaaagcgcccgatgaagagggtgacggagcctttaaaacagatgggagccgcgattgacggaagagcggacggagggtttacgcctttatccgtaagaggcggacaattgaaaggcatagattacgtctcccctgttgcaagcgcgcagatcaaatctgccgtgctgcttgccggattgcaggctgaagggacgacgaccgtcactgagcctcataaatcaagagaccatacggaacggatgctgaacgcttttggcgccgagcttgcggaaacggagacgagcgcttccgtaacgggcggtcagaagcttcggggagccgatattttcgtgcccggcgatatttcttcagcggcctttttcctcgcggcaggcgctgtcgttcccggaagccggattgtgctgaaaaacgtcggcctgaacccgacacgcacgggaatgattgatgtcttaaagcaaatgggggcttcacttgaagtgattccttcagaagcggacagtgcggagccttacggagacctggttattgaaacctcagctctgaaagcggcagaaatcggcggagaaatcattccccgtttaattgacgagatcccgattatcgcccttttggcaacgcaggctgaaggcacaactgtcattaaagacgctgcggagctgaaggtgaaggaaacgaaccggatcgacaccgtcgtatcagagctccggaaaatcggcgcagacattgaaccgactgaagacggcatgaaaatacacggcaaaaaaacgcttgcgggcggagccgatgtgtcaagccacggcgaccaccgcatcggcatgatgctcggtatcgcttcatgcctgacagaagagccgatcgacatccgtgatacagaggcgatccatgtctcatatccgacattctttgagcatttagatcaattagccaaaaaagcctgaagacgattcttcgggcttttttcttcatgtgtcataaaatcttgggctttgacatagcttgtcttaaacagaaaactaaaagaaagggggaatgcgttttcgttacagaaacagccggaacaaattgcgctgtttgcgtataaagatgccgtccccttttttgccgttttcctcttaaccattttctgataaactataatgccgggtgaagcatcttatttgcgggcaggccctgtctgaattatgataagaataacccgaataaaaacccttttcatttggttgatgaggtataggaaaagaaaggaccggtctgatttgaatacattgattcaagaagccataaaattagttgaagcaggtgaaaccgaaaagggactcaaagcgctttcaaaagctgaaacagagcttcatgacgaagacaaagccattgcagcccagctctactatgaatggggaaacgccgaaaaagcgttagcgctgatcagtgatctgcatgacctctatccgggtgagtctgagctgacgaatttttacgccgaattgttaatagatattgatgaagaagaaaaagctcttgaggtgctggagacgatttctccggaagacccgtcttacgcggaaagcctccttttaatggctgatctgtatcagatgcagggcttatttgaagtaagtgagcaaaagctgttacaggcgaaagcgatgttacaagatgaacctgttattgatttcgctctgggggaattatacttcactcagggatcatatgcaaaagccgttccttactatgaagagacggcaaaagaacggcacgaaatcggcggcgtaaacgttcatcagaggctggctgagtcattgagcgcggcgggtgaatttgaggaagcgatttcatggtatgaaaaagcggcggcagaacatacagaaccgaatacgattttcgggtacgggttcacagcctatcaggcgggaatggtcaaaacagccatcaagcagctgtctgatttaaaagggcttgatccttcctattcatcgctttatatgccgcttgcaaaaagctacgaggcagaaggcatgtatgaagatgcattaaaaaccgctaaagaaggtattacttacgatgaatacaataaagagctttttctctatgcggcgaaaatggcgttaaagctcggcagcgaagaggaaggcaaaaagcttcttcaggaagcgctggcgctcgatccgggttacgtggaagcgctccatacgcttttagccgtctatcataaagaagaaagctttgaagagattattgatctgattcaggaagtccgcggctacggagaagaagatccgaaatacaattggtatttggcgggggcctatacaggcctggagcaatacgctgaagcgaaaaaaagcttcgaagctgcgtatctccattatcaggatgatcgggatttcttatatgaatacgctcacttcttattggaagagggtctccagaaagaagcgctgccgcttttaaaacaagtgctttcaatggatggaacaaacgaagagcttgaagaaacaatcttacggatagaggatgaatttttaagataagcaggattttggaccatgcttgctgaatgtataagtgatgtcagattatacgatcgatagaggagggaattacatgcagacccctgtttctgtcaatgaaaaaaaggattttatccgttggtttttaaatcattatcagcttaaacgccgggagtgcgtctggattttaaattatttaatgagtcatgattcattaatggaaaaagtccattttgtagaacaagccgaattttgcccgagaggcattatcatgtctactcattgcgttgatgaggtgccgtttaggttttacaaagaaaatgtcatgactacggacgcggaaaaatcttttcacgacatccggttaaataaacagcaggatttatttatccagctgaatttccgttcggcctacagctcaccggaatatgccgctgttcttgaatcaaatccgcatctgccgaaagacctgtttgaaaataaacaggatcaggggatggctgaaaaaatattagaacatgccatttccactttccagcgggaaaagctgcttaaagatatcgacgaggcgctggaccgccacgacaaagaaacatttgaaaagctttcccgccaattgaatcagctcacataaatgacagccttgcagaatatgcaaggcttgttgcgtaaagaggaggaacgagacatgagatggagggccgctgatgccgatgcctatttacaatctgcggattacattgataccgctgtcattccgttaatttccataacgtcttcaggaggcttaaaagaggccgttgaacagggggaaagcacccaattgctttctgaagagcttgagcgccaattgaagggacgggtatatttattcccctcttatacatatgttgatatagaccaatcacaaatcgccctgcttcaaaaactcaaagaagaggtgatgaccaacttcaggcacgccttgttcctgacggcagacgaaaaatggaaggattctgaaatagggtctgatgtcatatacatacctgccgttccgtttgaacatatgaaagactctttaaagagaaaaattgcggatgacaagtgcggagaaattttgaacgttttgttacagaagtggaacaattcttaaaaactccaggcatcctgcaaaacacccgttttgcctctgttgaccttgctgaaagattcatatattatgagggtgtcaaatctcagaattattttctattttagttaatttttggtcaatctttagggggggaagagatgggcggaaaacaagatatatcaagaagacaatttttaaactatgcgctcaccggcgtggggggatttatggccgccagtgcgcttatgcctatggtccgttttgcgctggatccggtattaaaaccgacgggagatcaaaaaatggtgcaggttgtcagtgtggatgagctgacgaaggagccgaagcggtttgactttaaaattcatcaagtcgacgcctggtacgaatcggaagaatccaggtcagcctgggtttacaagcatggggatgaaattatagcgctttctccgatctgcaagcatttgggctgcaccgtaaactggaacaatgatcctaaaaatccgaacaaattcttttgtccctgccattacgggctgtatgaaaaagacggcacgaacgttccgggcacgccgccgctcgcgcctcttgaccgttatgagcaaaaagtaaaggacggctttttgtatcttggaaaagcaaagcctaggggggaagggtgacatgctgaataaaatttatgactgggtggatgaacgtctcgatattacgccgatgtggcgggatatcgccgaccatgaagtgccggaacatgtaaatcccgctcaccatttctcggcttttgtctattgtttcggcggtttgacgttttttgtaaccgttatccaagtgctctccgggatgtttttaacgatgtattatgtgccggatataaaaaacgcgtgggaatctgtgtattatttgcagaatgaagtcgctttcgggcagattgtaaggggtatgcaccattggggcgcaagtttagtcatcgtgatgatgtttttacatacgctgcgggttttctttcagggagcttataaaaagcctcgggaattgaactggatcgtcggtgttctgatcttttttgtgatgctcggtctcggatttacagggtatttgcttccgtgggatatgaaggcgctgtttgcgacaaaggtaggtcttcagattgccgaggcgacgccattgatcggagcgcaggtgaaaactcttcttgccggccaccacgatattgtcggcgctcaaacgctgacgagattttttgcgattcacgtattttttctccctgccgctttgtttgcgctcatgggcgcccactttgttatgatccgcaagcagggaatttcaggaccgctttaatacaaatctgatataaaagggaggggatgacatgcaccgggggaaaggaatgaagtttgtaggagattcaaggataccggctgaaaaaaaaccgaatataccgaaagactattcagagtatcctggaaagacagaggcgttttggccgaactttctgctgaaagaatggatggtcggggccgttttcctcgtcgggtttctcgttttaacgattgtgcacgagccgcctttggaacgggtggcggatcctacggatacagggtatattccgctgccggattggtattttctatttttataccagcttttaaaatatgaatatgccgcagggagctacaccgttatcggagcgatgattataccggggcttgccttcgggtcgctgcttttggctccgtttctcgacagggggtctgaaagaaggccgtggaagcgtccggttgctgtcgggatgatgcttttggcgctttgcgctacggtctttttaacgtggcagtcagtcgcgacacatgactgggcaaaggcggaggagcaagggaaaattaaaaaagaagccgccattgatactgaatcagacggttataaggtatttaaagaacaaggctgtatttcctgtcacggggataatcttcaagggggaggcgccggtccgtccctggtcgataacgggctgagcccggaagaaattaaaaaaatcgccgtcaaagggaaagggcagatgccagccggtatttttaaagggaatgacaaacagcttgatcagctggcgaagttcatttctgaaacgacagcgaaataacgtattgtgaagtagacaacagcaggatatactttatgaaaagagctgaccggatgtcagctttttttgcatgatacatactttttacggactgagagttgatggtatgaggtggatttcttatcttttagggttgcgcggcatgcttctgcttgttcttgccgttaattttatcggtacggtgtacggctattattggtatgtgccgcagcttgcggacacgccgttccgatttctgatatttgtgcctgacagcccgacggcgacgtttttcttcctgtttgtgcttctggcatttctcatgggaagaaacgcgccgctgtttgaagcgctggctcttgtaacccttgtaaaatacgggctgtgggcggtcggaatgaatgtctttgtgctggtcaaaatggggcagatgccttgggaagggtatatgctgattgcttcacattttgccatggccgttcaaggcgttttatacagcccgtattttcggttccggttatggcatcttgccgttgctgctgtttggacgcttcataatgacgtcattgattatcttttcggcatgatgccccgctactcaatgctcaatgactatatgcaagagatcggctatgctacattctggctgagcatattttcactcggccttgcatactatttggtgatttctaaaagacggataaagcttgacttacactgatagaatcttggtctaaccttgtcccgctcctcatattctgtaaagagaaggagtgggagggacctctatgaaacgaaagctgacgatctgtcttttacttgctcttatgtgtttcatcacaactgccaaagctgaagatgagggcggtctcaaggaactgaacgacctttcggataccgttttccaaatgacgcggcattcgcagtatgatgaggctctgcaagtgcttggctactttaagaaaaaaatgacacacgtaaactcactgagcggcgccgaagtcaggcaggtgactctgggcttcaatgatttagtgcgcgtcctgaaacaggcagacgcctcagataccgaaaaaatccgggcagccgcccagttcaggttggtaatggatgcgatggaagaccactccgatccgctgtggggttcgcttgaaagaccgattatggcgacattcagcgccttaaaagaagatgtcagcggaaacggaagtggaaatttcaatgaaaagtggaatgaatttatatcattatatgatttaatttatcccagcctgacaatggatgtgtcggccggccagcttgatacggtggcgaaacatatcgaggtgattgagcaggaagggtttcagcagatgacaaaaggaacaaagcttgagcgtctgacactcctgcagcaggatttaaagcgggtttttgacaaggtggagcgggatgacgctgacccttcgctgctctgggtcattctgacaacaggcggtatcattattactgcgctgacatatgtcggctaccgaaaatacagagcggaaaaaaagaaagagaaaaagcgtgagtatcctaagtctaaataaacacaaattgctgtaaaggagctaagtcagtgaaaaaactcatccagcaattggcttcaaaacacctcccgcagccgatcagaggcagaaaaggggcgactgacgaaggaccgcgaaacctcgcgcgtgacttccagaatcctgacatgctcgttccgccttcaacggatgcaggaacggttcaaaacttgaaattctcattttctgatacgcatatgaggcttgaagacggcggatggtccagagaggtgacggtcagggaactgccggtatccaaaaacatcgcggcggtgaacatgaggctgaaaccgggagctgtgcgggagcttcattggcataaagaagccgaatggggatatgtgattaacggaggagtacgtttaactgcggtcgatcaaaatgggcggaattttattgataacgtaagtgaaggggacctgtggtattttccttccggcattcctcattccattcaaggattagagcagggaagtgagtttttgctcgtctttgatgacggctctttttcagaaaacagcaccttttcagtaacggactggtttgcccacaccccgcgcagcgtgctggaggcgaacttcggtgttccgggctatgagctggcttacattcacaagaaagagcgttatatgttccagttggaaccgccgcccccaattgagcgggcagcagtctcttccccggaaggccccgttttagagccgttcagctacaagctttcccggcaggagcctcttgttaccagcgggggaagagtaaagattgtcgattcaaaaacgtttaaggtgtcaaaaacgattgctgcagctcttgtggaggtcgaacccggaggcatgagagaattgcattggcacccgaatacggacgagtggcagtattacctttcaggagaagcgaaaatgacggtgtttgcggcggagggaagagcgcggacatttaactatcaagcgggtgacgtaggatatgttcctgttgcaatgggacattatgttcagaataccggtgacaccgtgcttcgctttctggaaatcttcaaaagcgaccgtttcgaagacgtctccttaaaccaatggctggcactgacgccgcagcgcttcgtcgagcagacgctcaatgtcagtccggcattcgcccgccgattgaaaaagaaaaaatcaccggttgtcaaatggaaacacgaacagtaaaggcggcaaaagccgcctttttattatcgtctgatcggatttttattttcatcaagcgtaaatccttcgccgagcacatcatggacgtcgcttactgcaacaaaggcgtgcgggtcaacggaagtgatgacgcttttcaaaagcacaatttcgtttttcggaacgacgcagtaaagaacgtccctgtcttcttttgtatatgatccctgtccttttaaaacggtgacgccgcgctccatctcttcaatgattttttgctggatcaaatcgtttttcgaagaaataatcgttgccccttttgcggcatagccgccttcctgtataaaatcaatcaatctcgcagcgacaaaaacggctacaagcgtgtacatcgcttccttgtaagaaagatacgtaaacaaagaaagcagaatgacacaggcgtcaaaggcaaacatcgtccggcccatcgggattccgaaaaatttgttgatcagccgagcgatgatatcgaccccgcccgtcgtgccgccgtatttaaaaataatgccgagacccgcgccgataaaaacaccggcgaacaaggcggccagcgctaaatcatgcgacagcggcatatgaatttcgtagcgctgaaaaacactcagaaaaacggaaagagagacggtgccgatcagggtatagacaaacatcgtccggccgagcatacgccagccgatgaaaaagataggaatgtttaataccaggttggaaatagaagggctgatgtggaataacgcatataaaagcagcgtaatgccggtaaatccgccttccgccaaattgttctgcatattaaagtgaaccagtccgaatgaaaaaacagcggcgccgattaaaataaagcaaatgtttttgattctgatttctccaagcattgcatcaaaccccttttccttccataagattgcgtaaatattatagtggatacaaaagaaaacagcaaactgccgtttttaacatttgtcaaatgtacttgaattagctaacatggaagagatgacaggaggtattcgcacagtgagtgacaaaacgatgaaagacttacaagctgaggtcgatgaatatatcggccaattcaaagaaggctatttcagcccgcttgccatgatggcccgtctcacggaagaactgggcgaacttgcaagggaagtcaaccattattatggggaaaagccgaagaaaacgacggaaaatgagaaaagcatggaagaggaaatgggcgatgtgctgttcgttctgatctgcctcgccaactcccttgatatttcattggaggaagctcataaccgcgtcatgcataaatttaatacacgtgataaagaccgctggactagaaaagaagaaggaaagtaggagaaaccatgtcaaatgaaaccattaaagtcgtcattgccggaccgagaggcagaatgggccaggaggccgtaaaacttgccgtccgcacgcctcattttgagcttgtcggcgccattgaccatacatacgatcagcaaacattacgggaagtgatgtcagctgattcagacgctcttatttatacggatatccgcgcatgtttccaagaaacaaaaccggatgtgctgatcgatttgacaacgcctgaaatcggcaaaaaacatacgaaagccgctcttgaacacggcgtccgccccgttgtgggaacgaccggattttctgaagcggatttagaggagcttcaagccttgactgaagaaaaaggaatcggcgccatcatcgctccgaattttgcattgggcgcggtgctgatgatgaagttctcacaaatggccgccaactattttgaagatgtagaaatcattgagcttcatcatgatcaaaagctggatgccccgagcggaacggcgctgaaaacagcggaaatgatttcaagcgtccgtacagaaaagcagcagggccatcctgatgaaaaagaaattctgccgggcgcccgcggtgctgaattaaacggcatccgccttcacagcgtgcgtctgccgggccttatcgcccaccaggaagtcatgttcggcatggacggccagacgctgaaactgcgccatgattcctataaccgggcttcctttatgtcaggagtgaagctgtcagtggagcaagtgatgaaaatcgaccagcttgtatacggactcgaaaatattatcgactgaatcggcaagggggagaacatcaaatgaaaattgctttgattgctcacgataaaaaaaagcaggatatggtccagtttacgaccgcatataaagatatattgagccatcatgagttatacgcgacgggtacgacaggcttaaaaatccaggaagcgaccggattgtccgttgaatgttttcaatccggcccgctcggcggagatcagcaaatcggcgcattgattgcggcaaacgccctggatctcgtcatttttctgcgcgatccgttaactgcgcagcctcacgaaccggatgtctccgcgctgatccggctgtgtgacgtatacgcgatcccgctcgccacaaatatgggaacagcggaaatccttgtccggacgctggacggcggggcatttgatttccgcaatcttgtgcgcggaggagagccgaatgtctgaacacgttgatattctggcgttcggcgcccatagtgatgatgtcgagatcggtatgggcggcacgatcgcaaaatttacggctcaaggaaaaaccgcggtgatatgcgatttgaccgaggccgaactatcatctaacggaacggtagggataagaaaagaagaagcggcagaggcggcacgaattctcggcgtaaaagagagaatccagcttacgcttcccgaccgcgggcttttgaaaagtgaggacggcatccgccggattgtcagtgtcatcagagcctgccggccgaaaaccgttttcatgccttatccgaaagaccgccatcctgaccacggcaatgcggcggctttggtcgaagaagcggtgttctcggcgggaattcataaatacagagatcatcaggaactgccggctcataaggctcagcgcgtatactattatatgatcaacgggtttcaccgtccggactttgtaatcgacataacggaaaccatcgatctgaaaaaagaaagcctgcacgcttatcaaagccagtttattcctacggcgcagtcagtgaacacaccgctgaccaacggttatatcgaaatggtggaagcgcgggaaagactgtatggcaaagaagccgggacggggtatgctgaaggcttcttttcaaaacagcttcccgttttgaatgatgatgtttttgggggcggacaatgagaccattaaaaatagggattacatgctacccgagtgtcggaggctcgggtattattgcgacggaactcggcaagctgcttgcggaaaaagggcaccaggttcatttcatcacatcaagcatcccgttcagattaaatacatatcatccgaatattcattttcatgaggtggaagtcaatcaatacgcggtatttaaacatccgccttatgaccttacactggcgagcaaaatcgccgaggtggccgcgagggaaaatcttgatatcattcacgcgcattatgcgctgccgcatgcggtatgcgcttatctagccaaacagatgctcaagcgtgacatcgggatcgtgacgacgcttcacggtacagacatcaccgttttaggatatgatccgtcattaaaagatttaatccgttttgccatcgaagcgtccgacagagtgacggcggtatcaaccgcgcttgccggagaaacatatgacttaatcaagccggataaaaaaattgagaccatctacaactttattgatgaacgtgtttatcttaagaaaaatacagagagtataaaagagaaacatggtattttgccggatgaaaaggtcgtcatccatgtttcgaacttcagaaaagtaaaacgtgttaaagatgtcatccgcgttttccgtaatatcgcagccaacacaaaggcgaagctcctgcttgtcggtgacgggccggaaaagtgcgtcgcttggcagcttgtcgaaaaatacggactgcaggatcaagtgctgctcctcggaaatcaggacagggtggaagagctgtattccatcagcgatcttaagcttcttctgtctgaaaaagaaagtttcggactcgtcctccttgaggcgatggcctgcggcgtgccgtgcatcggaacaaatatcggcggcatcccggaagtgattaaagatcaagtaagcggttttctggtggaagtcggcgatattcaggcggcatctgaaaaagcgcttgccgttttagaagataaacagctcagcaaacgattgactgatcatgcgctgaaaatggtggagacctccttttcttcgcaaagaatcgtcagtcagtatgaacggatttatgacgaattggcaggaccggagtgatcttatggaacaggaatttgtcaaagccctccccatccttcatcatctgatgaaggcgggccatcaggcgtactttgtcgggggagccgtcagagacagctatatgaaacgaaaaataggtgatgtggacatcgcaaccagcgcttcgccgaatgaggtggagcgcctctttaagcggactgtcgatgtaggaaaagagcacggcaccgtcatcgtcctgtgggaagatgaaacctatgaagtcaccacttttcgtgccgaatcagaatataaggactatcggcgcccggaagctgtgcggttcattacttctttatcagaagacttaaagcggagagacttaacgattaatgcgatggcgatgtctgccgaaggagagctgcttgattatttcggaggcgcacatgatatcggacaaaagctgatccgtacggtgggtaaccctgaagaccgttttcgggaagacgctctgcggatgatgagagccgtccgctttatgagtcagctcggctttctgttagaaaaagaaacaagagaggccgtcataaaagacagggagcttttggcacatgtatcagtagaacgaaagaccgtcgagtttgaaaagctgatgcagggcgctttctcacaagaagcgattcaaacgatggtgcagacaggtctgatacaagagctgcccggcctttccggttatgagcagcaaatgcttgaagcaagcggctttccgttttcttctttagatgcacgcgaagaacgctgggcagcgctgttattgtttctcggtctttgtccgaaaagtgccgaggcgtttttaaaacaatggaaactgccgggaaaggtcataaaaaaagcggtgcagatcataagcgtttatccggcgcagctggaagcagaagcgatgtaccgagcgggagaggcgctgttttcagccgttaaaatcgggatgctgaaacagcataagacgattgatgaacaaaagctgaaagaggttcagagcctgtatgagcagctgccgatcaaaagccttcgagacctcgacatttcaggcgctgatctgatggagctcagaaaccgccgcgcgggtaaatgggtggccgaagaacttcgccggattgaagaagcggtattggcagggaagcttcctaaccgaaaacatgacataaaggagtggctcgcatcatgggatcaacattaagaacccgattaattgatttattttctgaggcgggtgacggctttatctccgggcagaaaataagtgacgcgctcggctgctcgagaaccgccgtttggaaacatatagaggagctccgcaaagagggctatgaggttgaggcggtcagacgaaaagggtacaggctcattaaaaaaccggggaaactcagtgaatccgaaatccgtttcgggctgaaaacagaggttttgggcaaacagcttcattaccgggacgtcctgccgtccacccaaaaaaccgctcatgaacttgccaatgacggcgcgccggaagggaccctcgtagtcgccgataaacaaacggcaggcagaggaagaatggccagagtatggcattcacaggagggaaacgggatttggatgagcctcattctgagacccgacgttcctttgcaaaaaacgccgcagctcaccctgttatccgccgttgcggtcgtacaggccatcgaggcttttacaggcgtacaggccgccattaaatggccgaatgatttaatgattcacggcaaaaaagccgtcgggattttaactgagctgcaggcggaagaggaccgtgtccgttcggttattctcgggatcggcatcaacgtgaaccagcaggaaaccgattttcccggcgagcttcaggacattgcgacgagcctgagcatggaagccggtgaaaaaattgacagagcgggtctgatacaagagattctgctgacttttgaaaaacgctatcaggattacttgaaccacggctttacaccgatcaagctgctatgggaaagctatgcggtcggactggggaacgagctcagagcgagaacgctgcaaggaacgttttacgggaaatcgctcggcattgatgatgagggagttcttcttttggaaacgagagacggtataaagaagatctattctgccgatattgagctcaattaatcttagttggtacaagcctcgtgaatttggtatacttcctatgggcagtatcataatgaactgcacctgatcagcagaacagagattacgaaaagtctgccttgatccaaaaaaggactgggacagagggatgacattcgccgaacgttaaacaagtgggaatccttcttattttacagaaggcttttttgcttgcgaagaattggcggctcatctcctcaccgtttagaggaggagaaacagaatgaaaacaaaactggatttcatgaaaatgaaggaaaacggagagccgatcgtgatgctgaccgcttacgattatccgcaggcaaagcttgcggaacaggcgggagtcgacatgattttagtcggggattcgctcggaatggtcgtgctcggactcgattcaaccgtcggcgtaacggtcagggacatgattcaccatacaaaagcggtaaaacgcggtgcgaaaaatacgtttatcgtaactgacatgccgtttatgtcttaccacctttcaaaagaggatacattgaaaaacgccgcggccattattcaggaaagcggcgcggacgcgttaaagctggaaggcggagacggcgttttcgaatccatccgcgcgctgactctcggcggaattcccgtcgtcagccatttaggcctcacaccgcagtctgtcggcgtattaggcggatataaagtgcagggaaaagatgagcaaagcgcgaaaaagctcattgaagacagtatcaaatgcgagcaggcgggagcgatgatgctcgtgcttgaatgtgtgcctgctgaactgactgctaaaataatagaagaagtatccattcccgtcatcggaatcggagccggttcaaaagcggacggccaagtccttgtctatcatgacgtcgtcggccacggcgtggacagaacaccgaagttcgtgaagcaatacgccaaaatcgacggcacgattgagtcggccctcagcgattatgtccgtgatgtgaaagaacgggttttcccggaagaaaagcattcctttcagataaaccaaactgtgctgcaaggcttatacggaggaaagtaagcgatgaaacaactgacagaaactcaacagctgaaagaattaattgcacaataccgctcagaaggccggacgatcggattcgtcccgacaatgggttttcttcatgaaggacacctgaccctggttgaaaaagcaaacaaagaaaacgatattgtcgtgatgagcatctttgtcaatccgactcaattcggaccgggcgaggattacgaagcatatccgcgagatttaaagcgcgatgcccggcttgcagaacaggcgggagcagatgttttgtttacgccgtctccgagtgacatgtataagggcgagcaaaatgttgccgtgcaagtgaaaaggagaactgacgtgttgtgcggcgtctcccgcgtcggccattttgacggagtggccactgtgctgacgaagtttttcaatctcgttaaaccgacccgcgcctacttcggcctgaaagatgcccagcaggcagcggttgtggacggattgattgaggatttctttatggatatcgaattggttgcagtggacacggtcagagaagaagacggacttgccaaaagctctcgcaacgtctatctgactgagcaggaacgcaaagaagcgccgatgatctataaagcattgcagcaaggtgccgaactggtcagagacggtgaaagaaatccggaaaccgttataaaaaccgtcaccggtatcatcgaaaacacaagcggcgtcattgattatgccgaactgtacgcttatccggagctgactccgcttaaaacattaaacggcaaggtcattctggcctgcgccgtccaattttctaaagccagactgattgataatatcattattgatattgatgaatgggagagatcataatatgtaccgcactatgatggccggaaaactgcaccgcgctaccgtgacggaagccaatttaaactatgtcggcagcatcacgattgatgaagatcttttagatgccgtcggaatgctcgctaatgaaaaagttcagattgtgaataataacaacggagcgagacttgaaacgtatattattcccggtaagcgggggagcggcgtcatctgtttaaacggagctgccgcccgtctcgtccaagaaggagataaagtcattattatttcttatcaaatgatgtctgatcaggaagcaaaaagccatcagccgaaggtggccgttctggatgatcagaataaaatcgagcagatgctgggccaggagccggcacacacgattttgtaaaagagcccccttcatgggggttttcttttaagatttaggggcaaaagctgtttttccgctccatttctcaacaaaacgtgttacacttttctcgtatgcaagaattgaggtgtccattttaatgaacaaacaacggttcgttgtcatagatgtcgaaacaacaggaaattcgccgaaaaagggcgataaaatcattcaaatcgcagcggttgtcattgaaaatggacaaataactgagcggttttcaaaatatatcaatccgaatcaggccatcccgccgtttattgaacagctgaccggaatttcgtccggaatggttgaaaatgaactgccgtttgaagcggtcgcagaggagatttttcatctgcttgacggcgcgtattttgttgcccacaatattcatttcgacctcggatttgtccggcatgaactgagcgaagcgggctatgagctgccggattgtgaagtgcttgatacggttgagctttcgcgtattgttttcccggggtttgaaggatataagctcggtgagttgtgcgcagagctgaatattgttcatgaccgccctcaccgcgcagacagcgatgcggaggttacgggcctggtctttttagacattttacataaactgaaacatctgcctttaccgacgttaaagcagcttagaaggctttcacagcattttatcagcgatttgacgctgcttttggattcttttattcatgaaagcaggccggcggaagaaaagagctgcattccatacgcctctttttcaattaaagagcccgatcacattccggtttcccgtccggtgaatgcggccattgaccttgaaaagtggaacgaagaaaaagaacagatcttgtccggcatcatcccccgctatgaaaagcggaaaggacagcttacgatgatggatgaagtgcttggcgccttccgcaatcgggagcatgcgctgattgaagcggcgcccggcatcggaaaaacgatcggttatctcgttccggctgttttatttgccaaagcggaacaaactcccgtcattatcagcacgtactctactcttttgcagcagcagatcatgtctaaagatcttccgcttttggagcgtatgtttccttggccggtcaaagctgctattttaaaagggaaatcacattatctgtgcctgccgaagtttgaacatattctgcatgaggaagatgacaactatgatgcggttttgacgaaagcgcagcttctcgtctggctgacggagactgaaacgggcgacgccgctgagctgaatcttccatcaggcggcagattgctgtgggagcgcatggcttacgatgagaattcttttatgaaaaaagggaaggactcggctgccgggttttatgaacgggctaaagaaaaagcgcaggccgcagatctgattatcacaaaccatgctttgctgttttcagatcaaagcagtgaaacgaaaaaactgcctgcaagcggaacggtcatcattgatgaagcgcatcatttcgaacgcgccgccagcgagcacctggggaagagagcttcatacatcggactgcacacaaagctcagccgaatcgggaccttaaaggaacacggactgttaaagcggatgagaaaactgttttatacgtatgaactgccggcggaaagtttttttgacgccgatgagtggatgaagcatattcaatcggaaagcgacgcatttttcagttcagtgcattcttttgtcaaacgaagaaaacctaaagacgatctgaaccgtctcgtctatagtctcaatcataaaagccaggataaagggtttcacatgataacggacggagcggagcggctttgtgcgatgcttgatcagctgcttgacatgttttccgtacaggagaaactgttacatcaaaagcttgatcagatgaaaagcggagcggcttttttagcgggcgaatatgtaaagtgtatcagggggctgaaagaatatcgcgatacgttcagcaggctgctgtttgaaaatgatgagaaagaagccgtttgggttgaaattgatgcgaagggcgcaaaaaatgccgtcagcatctatgcgcagcctttggagcccggtgaaatgctggcagaccagtttttcgcccgcaaaaaaagcgttgtgctcacatcagcgaccttaatggtggagcagtcttttcaatttatgattgaaaggctcggacttgcggatttttatccgcgcaccaaaagcatcccgtctcctttttcttacgatgatcagatgaacgtcatcattccgaaagagatgaaatccgttaaatatgacggggagcgggaagtcattgagcatattgccaagtatgcagaaatcatgtcaaagggaaaacagccgaagatccttgtcctgtttacgtctcatgatatgctgaaaaaagtgtatcaggaactgaaactcagtatggagatctcaggcattcagcttctcgcccaaggtatttcaggcgggagtcccggtaaattaatgaaaacctttaaaacggcaagccggtcgattttgctcggaacgaatcatttctgggaaggcgttgattttccgggggatgaattgtcaaccgtcatgatcgcaagacttcctttcagggcgcctgataatccgcttcacgccgcaaaatgcgaatttgccaagaagcaggggaaaaatccgtttcagacgatttccctgcctgaggccgtgttaacgttcagacaggggatcgggcgcctgctccgtacggcgggagacaagggaacgatcgttcttttagatcagcgtgtaaagacggcgggatacggacggctgtttcttgaagcgctcccgacttcatcccttttggagctgacggatgccgaactcggggcttatgtcagccaaacggaataaaagccgcataaacgcggctttcgtggtgtgggatgaggaattgtttttatagtaaaagcgggttcatgccgccttgtgattttattatgccgcgggcgcatcccgttatgactaacaaaatttgttcgaccgatggagggtataaaaatggaaagcaaaattgaaattctgtcaacgattaatgtggagcattcagatgatttatataaaatcgtcgatacattaaaccggactttgaaacgggacaacctgatgttcggccttgcgctcgacgaagaaaatcaaaatgaagcggtcttcaccatttatcgcacataggtgaaaaagatgagaaaaaaagcattaatatttacagccgtatttggtattatttttttagcagttcttttattttcggccagcatttttaaatctgcaatggctcaaaaagaagaaggccacgaaacagctgccgcagccgctaaagaaaaaacgaatctgacagacgctgagaaagtggagacctttgtcggcaaacagaaatattatgttgttaccggaacggataaacatggaaaagatatgtatgtatgggttccggccgacaaaaaagcaaaaattctctcaaaaaaagccagtgacggcatttcaagcggcaaggctgccaagatcgttcgggacgaagggcttgtttccaagctgaatggcgttcacccggcgagagaaaacaatgttccgttatgggaagtgacctatatcaacaaaagcgggcagtatagctttagctatgtggactttacaagcggcaagattctcaaaaacatcacaccgtgagacgtattagggggagttcaagttgaaattggcaaaaagagtatccgcattaacaccgtctgcaacacttgcaattaccgcaaaagcgaaagagctgaaagcggaaggccatgatgtcatcggcctcggagcaggagaaccggattttaatacgcctcagcacattatagatgccgcggtgcgttccatgaatgaaggctatacgaaatatacgccttcaggcggtctgccggccttgaaagacagtatcgcaaaaaaattcaaaaacgatcaggggattgaatataagccgtcagaaatcattgtctgcactggagcgaaacacgctctgtatacattatttcaggtcattctcgatgaaggggacgaagtgattataccgactccttactgggtcagctatcctgagcaggtgaaactggcaggggggcgtcccgtctatgcagaagggctggaatccaatcagtttaaaatttcaccggagcagctgaagcaggctatcaccgagaaaacaaaagccctcattatcaattcaccgagcaacccgacaggtgttatgtatacgaaggaagagcttgcggaactcggaaaagtgtgtctggagcatggcattctgatcgtttctgacgagatttatgagaagcttacatacggaggaaaaaaacacgtctcaatcgcacagctttcagatgaattgaaagagcagacgattatcattaacggcgtttcgaaatctcacagcatgacgggctggaggatcggctatgcggcgggttcggagacgattattaaagcgatgacgagccttgcgagccacagcacatccaatccgacgtccatcgctcaatacggcgccattgcggcctataacgggccggctgagccgcttgaagagatgagacaggcatttgaggacagactgaataccatttacgctcagctcagtgagattcccggattcacctgtgtcaaacctgaaggggcgttttacttgttccctaacgccaaagcggccgcagaaaactgcggattcaaagatgtcgatgaatacgtcaaggcgcttctggaagaagaaaaagtcgccatcgtgccgggctcgggtttcggttcaccggacaacgtccgcttatcttacgcaacgtcactcgatcttttagaagaagcggtcaagagaatccgccgctttacggaaaaacacagctgattctgaaaaagcggcttttaaagccgcttttcacttgcattgaccccgttagagtagaacgggtataataaagtgatgaaaaaagagattcaggcagattcctgaatgtctttcttgttctggagggaaagagtttgaaaacaacaatcaaccaagtgtataaacacacaggcgaggaagtaacgattggagcttgggtcgctaataaacgctcaagcggtaaaatcgcatttttacagctgagagacggtaccggcttcattcagggagttgtcgtcaaagctgaagtagaagaagacatcttccaaattgcgaaatcagtgacgcaggaaacgtcactttatgtaaaaggaattgtgaaagaggacgagcgttcaccgcttggctatgagcttgctgttacatccattgaagtcattcacgaagcgactgattatccgattacgcctaaagagcacggtacggaattcttaatggatcacagacatttatggctccgttcgaaacgccagcacgcgattatgaaaatccgtaacgaaatcatccgtgcgacttatgaatttttcaacaaagaaggcttcgtgaaagttgatccgccgattttgacgggaagcgctcccgaaggcacgactgagctgttcgcgacgaaatattttgatgaagacgccttcttgtctcaaagcggccagctgtatatggaagcagctgcaatggcgctcggaaaagtattctctttcggaccgacgttcagagcggaaaaatcgaaaacgaaacgccatctcatcgaattctggatgattgagcctgaaatggcatttgttgaatttgaagaaaaccttgaagttcaggagaattatgttgcatacatcgtacaaagtgtgctggaacattgtaagatcgagctgaacacattaggaagagacacatcgaagcttgaacaaatcaaagcgccattcccgcgcattacgtacgataaagcgattgaattcctgaaagaaaaaggctttgacgatattgagtggggagatgacttcggtgcgccgcatgaaacagcgatcgcagaaagctatgacaaaccggtgtttatcactcattacccgacgtcattaaaaccgttctatatgcagcctgccaaagatcgtgacgatgtcgtgttatgtgccgacttaatcgctccggaaggctacggggaaatcatcggcggttcagaacgcgttcatgatatggatttattggaagaaagattaaaagaacacggtctggattcagatgcttacaaatggtatgctgaactcagacaatacggttctgttccgcactccggcttcggtctcggacttgagcggacagtggcttggatcagcggagcgcctcacgtgcgtgaaacgattccgttcccgagacttctgaaccgtctgtatccgtaatagttatgaaaaacgaagtctcctgcaagggagactttttctaagtaaaggggaaagctcccggagataaccttttacagtaagaggtgtaaggatgaaaaaacagcaatttatagatatgcaggaactcggcatttcaagcattcccaacctgctgctgacacattaccggcagctcgggctgaatgaaaccgaattgatcctgcttttgaagattaaaatgcatttggaaaagggctcttattttccgacgccgtttgaacttcaatcaggcatgtccatctctgctgaagagtgtacaagctgcctgagaatgtttattcaaaaaggttttctgtttattgaagaatgtgaagaccataacggcataaagtttgaaaaatattctctgcagccgttatgggcgaagctgtatgattacatgcagcattctcaaaatgaaacgcaggaaagaacgtcagaaagagaacaaaaaagcctgtataccatctttgaagaagagttcggaagaccgctgtcgccgcttgaatgcgagacgctggccatatggcaggatcaggatcagcatgatgcgattctgattaaacacgccttaaaagaagccgttttatcggggaaactcagttttcgctatattgaccggattttatttgaatggaaaaagaatggcttcaaaacggttgagcaggcgaaggcgcacagccaaaaattccggcgtgttcaaacgaaacagaatgatccgcaaaaagagtatacgaggcaggtacctttttacaattggctggaacaataacatgagaaggggagaaacgtgttaaatttaaagcagattgaatattgtcttgaaaaaatcggcgatatgtttccgcacgcagaatgtgaacttgtccattcaaatcctttcgaattggttgtggcagtcgcattatccgcgcaatgtacggacgctctcgtcaacagagtgacaaaaacgctatttcaaaaatataaacggcctgaagattatcttgccgtatcgctggaagaactccagcaggatattaaatcaatcggtctgtaccgtaataaagccaaaaatattcaaaagctgagcaaaatgatcattgaagagtacggcggagaagtgccgaaagaccgggatgagcttgtgaagctgccgggtgtcggacggaaaacggcaaatgtggtcgtgtctgttgctttcggcgtacctgcgatcgcagtagacactcatgtggagcgggtctctaaacggctcggcatctgccgctggaaggactctgttttggaagtagagaaaacattaatgaaaaaagtgccgaaagaggattggtctgttacgcatcacagattaatatttttcggccggtatcactgtaaagcgcaatctccccgctgtgcggaatgtcctttgcttccgctatgcagagaagggcagaagcgtgacaaaaaagggctggtgaaacggtgacggcgattgacattctggcaggctatgaaacatacctgcgcagccttacggacttggaaagcctcgagatcaaagcggcgctgcgccgccatccgctgtatatggatttcagcggccagccaacagtgcagccatggagggaaaggggcgaatatgtcccgtttctttttcagatttggaatgaaacgaaagaaacgctgcttcccgtttttcaaacaagaaaatcgaggtgtgatcaaaatgacatgctgaagggaatagcctgtctgattgccgcttttcattggacggcaggggagcgggtcacatcactcgactggactgtgcttgaaacaaagcattttcccgcggaaccgatcaattgggcggagcgaatggcgtttattttaacaaaaccgactcaatatcactcgtttattcagctggatgaattgatgacggagatgaagaaacaatatcataaatatgaagccatgaacaaatgttaaaaacctccttttcccataaggaggttttttgtacgaaaaaaatccttcacctgtttggggtgaaggatttcgtccgctaatgagcgggatttgactggatggttgacgaattggactgcccgttgatagttgaagatgagtcttggtttttatccgtttgaccgctgtcaggtttatttgagccgtctgaaccggaatcggaatcattatcagagccgttatcttgctgtccgttgttatcggtcccgttgccgggctgattctgattgttgttatctgtttgatccttatcggattgatcctgatttttatccgggtcatcagttggtgtttgatccgatccgtcagacgtatctgtctgatcgtcatctttgtttgaatcatcggtttgcgtcttgtccttatctttatcttcatcagtcttctgttcatcgtcagtcgctttatctttatccgcatcgtcttcttcatctttcgggactttgaaagatgctgatgccgtatcgctttttccgtcatcgttttccgctgtcacctggaagctgtatgtggagcctggcgtgacatttgagacgacggcttcttttgccgaactgttttgaatgtcactgtagcttccgccgtcaacggattgtttgacattgaatgttgcatcaccgtcataatcccagcttaaggttaatgattttttatctttgtcgtatttcacttgcaatcctgtcggtttatcggctttttctttcgtgtacgttttagaaacggcagttggctgcgttcctttcacgaagtactccgtcacttttttatcatccggcgtattcggtccggctaaagcggcaggattcgagcctttctcaactgtttcttttacaacgctgtcaggctgcttgaagcttcctttaccgtcatcaacgtatgagatcagcttttggaaaatccgttttgcgacttgctggtctgcagaagacagtgatttcttgcctgctttgttgccagactcaactccggtccaaaccgccgctgtatattgaggggtgtatccgacaaaccatgagtctgggactccgcctggagcaatgttatatttttgaatgtcctctttagtaaagttggtcgtacccgttttaccggcgacttccacgttcgccacctgagccagtttacctgttcctgattcgacagctgatttgagcatatctgtaatcataaacgctgtgtagtcgctcatagcacttttcggtttcggtgttaaatcaagcttagtgccgtcattaaattcaatcgatgtgaccgcgtgcggttcgttgtacgttccgttatttccgaacgcactgtaggcgcctgccatggtcatagtagatacaccgcggttaccctcaccaaatcccccgatagagtagggttcatatacttgatctttgtttaatcccaatcctaagtcgtttgcgaagtcgacggcatgatcttttcctgctgcttggtatgcttttaaagcaggaatattacgtgagtctgcgagggcctctcgcattgatatctggcctctgtatttattgtcccaatcatgaatcggtgtgccgtcagagtacgtataagctgagtcgtcaatctgttcatacgtcgaccattttttattttcaatgaccggtccgtaatcaagaatcggttttatcgtcgaaccgggctgggttttaccttgtgttgcataattgaatcccccggtagttctgttccgtcctgccccgatggcgcggatttctccgtttgtcgtatcaaggagcgtgacgccgccctgcatgccttcggtaaatccggctgtatcgccgttcatcaattgatcaagataatcttgtgctttcgtatcaagagtcgtgtaaattttcagtccgtcagttgaaatatcgacgtctttcttttcttttgtctcaatttctttcataacttcttcgacaaaagcgctgtatttatttgtgtcctttttatcgtattccttttggctgacgacgccttcatctttcatggacactttcttcgctttttggtattcagagtttgaaatgaatccttgtttttccattaagctgagaacgatgtttcgtcgtttttcggaagccttcgggtttttaaccgggttatatccggtcgggctttgcggcattccggcaagcgttgccgcctgttcaaccgtaagcttgctcaagtcttttacgccgaagaattcttcagccgcttttccgacgccgtaggcgcgcggtgagaaataaattctgtttaaatacatttctaagatttcatctttagaataatggcgctccagctgcagggaaagccacacttcctgtgctttccgtttaatcgttttctgatgggtcaaaagcgagtttttcacaacctgctgggtgattgtgcttcctccctctgaaccgaacccatccgtaaagttggcgaccaaagcgcctccgatacgaatcgggtctataccgtggtgcttataaaaacgggcgtcttcagttgcgataaatgcttctttcacaacatcgggtatatccttaatcgggacgtaggttcgtttttcaccgcccacttccgcgatttcttttccgtttttatcgtaaatcgttgaagagtaaggcgttttcagcttggcttcgtccaaagacggcgcgccggaaaccaaaacggcaaatgccgccgctccgccgactatgccaaggacaaacagaataaccaaggacagcacaatctttttgaataaaccgcctttacgctgtttcttgccttttttcggtgaagagggcttagtgcttttcgtctgccttgccttacggcgttcttcacggctcgtaaattgatctgacataacatctcaacctttcgtttatcaacctttcgctcagtctactgttcctgcgaaaaataaagctgttcaataatactaatataatcaattctcggtgagtatccaagggaaatcggaaaggaagcatcttctaattcgtctttgcgaattgattttctgccgttcttctcctttctctcccaaaagacaaacagcttgtcggcttcgaggaaataaacctttccgaaagcggatataataacaaaacaaatgccgtcttgcctgaccacctgcttcatatgctcaatctgatgatcatgaaaattctgcaggggaaatgccgttttgttttttgtttcttttgcctcgaaatcgatgtagcgtcctttataaatgccgttgtagtcagttgttgaagactgtttaaaataagcttccttaatgactgcggcgcttcttttcggatagtggacgtttacaatctggacgggtgtcggctttttgtgaatgacagcaatttggttagccagataatacttattcgtttcattcaggtcgtcttcgagggtcatgccgcgattactgtatgaatgagaccgtttctggctgttttgggatgaaaccgttttgttcggctgaaaagtttttccattcgggtaccgaatcactttttccatcctccttatcaaactaatagtgacggaagtgaatgaacgtgcataaacgacagaccgtaaccgccattcttcgcctgatcgaaaaagagacgaaaataaaaaatgccgataatatttcccggacgaatgcctataaagcatattatgaccgccatcctgagatcaagtggccgcttttggcatcctttgtgtcccgcaatgcgggctggtcgatgactgatttaagaggcgtcctttatcaggagggccttgacagcagtcagaaaaactggtttttcctttcgtatgaaagggcgaattggctgattttttctgatgcctatcctcagcttctggtctaccagtggtcaaaacaaatcggcgaacctcttttccgtcatcttccttatttccgcgtctcggcttttatgcaggaagaatggttccgcttttggcgtgacggagatacggaacggctcatgtatgctcttattataaatgaacaaaacactatccaagcacctattatacaaaatccttcgtttaaaaagaatgtttttggcacgattcctttttatttaagtgattggtttcactttaatacggtgatattcccttcatttgacggacatttatacggaatttccgtcaaacggttttcaaaaaccgaagagagaattacgctcggaaaacagctggcccgccttctgttcagccctgatcttcacgcttctttttaccgttttcttgataccgttcctcataccggttcacgctttgatatggagaaaatgatcggcatcaaaaaaagaacatcaccgatgcttaggacaacctatcccattgttgcccacccattagacggcgaaagggcggattggtttcaaaaaaggttaagaaaaggggctttcttacaggagaaaatgccgaaacagcttgaactgacggactggtacttccagaaaagacgggagctccatgcgctcttcgcggttaaagagtggctgaagaaatgaaaaagcccgaaaccgttcgctggggtttcgggctgctgatgtgttacgtggaagggcggtttgggccgcctaattttttatcaagcgtatcagtcgtttttgcttcggttttttgctgtttacctgcatttttcggtctcgttttcatacggcacctcctcaactgtatcgtttgcattaacgtgccggttcatacaaagtttgcggcacttttttgtcgaaaggcacgccttttaggataatctctgtttgtttgccgaactgcttctagttttgtcatgtgcagaggagagcggtatgaaaacgagaattatatttgaaagagatgcaagtgataaaagggaggaacatgaatgtctgtttacacgagcaaggctgatattctccgtctgctttctgatatcgaaatccggatttctgctgctgaaaaaacgcttacccaagcagtcagatgctgtcaggcggaagctgaagaaatcagacaggagaaactttcccgtcttgaggaagaggcgcgggagcttcatgtttgtattgatgacctgtttttgactgaccggcgtaaaaaggatttgccgcgagtctgccggataagctgattttgtgcaaaaactttggtaccatatgtactgaggtgagtccgtttgcagacacagtcgttattggagctgacagaacaaatgatagaggcggttctggaagccgaaaaaaggtatcaggatggaaaagagtcaggccgttcatatgatttttttgagacgattaaacccgatgttgaaaaaagagaccggctttgcgcgctttggacagaagcagcgcttgcgtttattcaggaaaaccgtccgaaatacgttcatcatgcacaaattcaggccgttacagaaaatttcggggagctgatgctccaatcatatgttcatcatattcataaaaaaagatacagggatttaactgaatctgttttatatacgcttcgtatattaagggatgaaattgaaaaagaaggcagctgaaaacggctgccttcttttatataaaggggtcgggtatgttattcatacgccgggttttctgctccacttgcttcgagaaccttcatactgtttcgaaattcggttgcggtgagatggccttgaatatagaggaattttgcaaagtccatcagtttatctgcacaatctgtttcatattttttcacttcagcaaaacgctttcttaagtatgatacgttcataatggtgcatcccctctcatgtatgttgagattatgttaacataacgattcgacttttttctgtttttaaaaaattaagactttcgacagcatttgacaaagagcagaatcaccgaaagcacataaccaaggcggaattcatacatatatagcagaaacttagtgagagacaaggggggaatgtcatatgcaatggagagcgcagccatatcaaaatatgtaccagcagccggcgggatatttctacccgcagcagatacagccattacagccgccgtatccgcagcagatacagccattgcaacagccgccatatcatcagcaagggcagtacccgcagcaattttatccgaatcaggaatacggtcatatacagcagccgtttgctcctgctcctcctcaggcaggcatgcccgggggccagccggggtttgtgaatccttaccccgttcccagaccgaatcagcagcagtcttcccaattctcaggcatactctcccagtttaaaaaaacgaacggacagtttgactttaataaaatgatggatacaacggggcagatggtaagcgccgtaaatcaggtcggatcgctggtgaaaggcttcaccagtatcttcaaataaaaagcatgaatgatatccatcattcatgcttattttttagggaaaaagaaggtaagcgtctgttcattccaggatgtttccatatcttcttcacttaccttatacgggaggacaacggttcttgtcatgcttgaagacacatgggatgattgagcctgtttatgatcgtagcggattgtaacgtgaaggtagcaccctttcgtttccaccagcatatccccgtcacggaacgtctcgggaacgccgatatcaaccgcgagccccgtcggctcttctctgacgtcaatcgtcacttgcgcttcagtaaaagccgaattgacaaggtgctgaaaaccctgcatcaattctgcgaagggacctgagtgaaaaaattggtccatcgcatggctgatgatgtcctcattactttgcggatcaagtttatcgttttgggattgatccatatgaccaccgcctttttacaaacagactatgcgatgctatgccgtatggttaagaattgaaggaaaaaagaaagtatggttaaatagtggagaataaactggtaacggattcacatttaggaaggggagcacaacacattgctgaaaaaattattcggattgggagacagccggaaaaagccggccgaggaagtgattttttctccggctgacggagcggtgatggatttggcttcagtgccggatcctgtattttcacaaaaaatgatgggggacgggatcgccgtcgagcctgcaaacggagaaattgtttcaccggttgagggagaagtgattcagctgttccatacaaaacacgctgtcggcatccgcaccctttccggagcggaacttttgatacatgtcggtttggataccgtcaatatgaacggcgaaggctttgaagcgcatgtaaaagaaggagacaaagtgaaaacaggcgatctgcttttaacgtgccggctggatttaataaaagaaaaagcaagcagcaccgtcatccctatggtgattatgaatggcgatgccgcagaacctttgcaatttgcaggcgcaaatgaagcgaaaaaaggacaaacagagctttttacgataaaaatgaagtaggcaggggctgattccctgctttttttcttgtgcaggattttcatctagccaggcaaacaaatattcggtaaactgtacctcataaagaggtgtgaacgatgaagaaaaaatcactgagcgaactgattcaggaattaaaaaatcatgaaaatattgtgcattggcatgaagaggaaccgcgggaggcgaaaacgatgccgatgccggagcaagtagatccgaacattcgggcggctctcgaaaagagggggatcgagcggctttttacacatcaatactccgcttttcagacggttcaaaacggagaaagcattgtggccgtcacaccgacggcctccggaaaaacactgtgctataatcttccggttcttcagtctatcgcggaagatgccacaagccgcgcactttatttatttccgacaaaggcgctcgcgcaggatcaaaaaagcgagctgaatgaaatcatagacgagacgggcatggatattaaaagcttcacctatgacggagatacgtctccggctatcaggcagaaagtcagaaaggccgggcatattgtgatcacaaatcccgatatgcttcattcagccattcttccccatcatacaaaatgggtgagtctgtttgaaaacctgaaatatatcgtcattgatgaattacatacgtaccgcggtgtattcggcagccatgtggcgaacgtcatccgccgtttaatgagaatctgcgctttttacggaagcaagccgtcatttatctgtacatccgccacaatcgccaatccgagggagttggcggagcagctgacgggaaaatctgtgcgcctgattgacgacaacggtgccccggcaggaagaaagcactttgctttttacaatcctccgattgtaaataaaccgctgcatattcgaaaaagcgccaccgtggaagtgaacgaacttgccaaaacttttttaaaaaataagatccagacgattgtttttgccagaagccgtgtccgggtcgaaattattttaagccacattcaggagatcgtaaaaaaagaaatcggcgcgaagtctgtcagaggctatcgcggcggatatctaccgaaagaaagaagagaaatagagcgggggttaagagacggcagcattctcggcgttgtcagcacaaacgcactggagctcggcgttgatatcggccagcttcaggtctgcgtgatgacggggtacccgggcagtgtcgcgagcgcatggcagcaggcgggccgggccggacggcggcagggagaggcgcttatcgtgatggtggcgaactctgatccgattgaccaatatattgtgcgccatcctgattatttctttaaacgctcgcctgaatctgcaaggattaatcccgataatctcattatattggtcgaccacctgaaatgcgccgcatatgagctgcctttcagagccgatgaaacattcggagaaaatgatgcgagggacattctcgagtatttagaggaagaaggggtgcttcacgaaaaccgcgaacgctatcactgggcgagcgaatcttttcccgcctccaatatcagtctccgttcggcgtcacaggaaaacgtggtcatcgttgaccggtcagagacggctgatgtaaaaatcatcggagaaatggaccgcttcagcgcgatgacgcttcttcatgatgaagcgatttatcttcatgaaggggtgcagtatcaggttgaaaagcttgattgggaacataaaaaagcgtacgtgcgaaaggtcgatgtcgaatattatacagatgccaatttagcggtgcagctgaaagtgctggacattgacagaacggacagcagaaagaaaacggccttacatttcggcgacgtcaccgtgaacgcacttccgacaatatttaaaaaaattaaaatgacgacatttgaaaatataggatcaggaccgattcatcttcctgaagaagaactgcataccagtgcagtctggcttgaattaaaagaaacggattcggaaatcggcgaaaaaacgcttgaacagctgcttttaggcattgcccacgtcctgcagcatatcgtgcctgtatacgtcatgtgcgatcgaaatgacgtgcatgtcgtgccgcaaatcaaagccgcacatacgggacttccgacaatctttctgtatgatcattatccgggcggaatcggacttgccgatgaagtatataaacgatttgatgaaatcaatgaaggggctgagcgcctgatccgacaatgtccatgtcaagacgggtgtccttcctgcatcggctccgaaatagaaggaatagatgcaaagaaagcgatactccggctcttgaattacgtgtaaaagaaaagggggacgaaagatgtccttgaaaaataaattaaagcggatgaaaaaccacctgaatgtgccggaagctgaaaaaaagccggcagcttcacaactttcggtcccggatattcaagtcccgtttagagaagaatgggaggcattcggagtgaagcctttcttttttgaggatgaatactgtcttatccgcgaaaccgtctatccgctttcgcaccgccacggacggtacagcttcagtgaacttgatgacgtcatggcattatggaataaaggcggtttgacacatactttatcagcagaaggatacgaaaaaagccagctgttcttctttgatactgaaacgaccggcctcggcggcggggcaggcaatatgatctttttgctcggccatgcaagagtgtatgaagaccgtgtcgcggttaaacagcatctgctccctaaaccgggaaacgagacagctctttacaaaagctttttaagtgaggttgacattacgtcccttgttacgtataacggaaaagcctttgactggccgcaggtaaaaaccaggcatacattgctgcgggacaggcttccgaaacttcctgacttcgggcactttgatcttctgcacggggcgagacggctttggaaacataaattagagcgtgtatcgctttcggcggttgaaaatgaagagcttgcttttaaaagggacgaagacacccctggttatttggcgccgatgctgtattttcaatttttaaaggcggaggacccggctcttttaaagggagtgctctcgcataatgaacaagatgtgctttccctcatcgctctttacatccatatgtcaaaaaagatttttgcatcttctgatcagacgtcagaacgtcaggaagcatacgccatggcgaaatggtttatcgctcataaagaaaccgatcgcgccgttttgcagctggaagcgctgcaaggcaaagactttgaagattcggatcgggccctttttgacttagcgatgctttataaaaaacaaaaccgcaggcaagacgccgtgcccctttgggagaaactgacggactctgatcttcacacatgcagacaccaatcagcggttgagctggcgatctattttgagcaccatgcaaaagattacaaaaaagctctgcaggccgcgcagcaggcggcagaagacggggaaatatcggaaaaagaagccgagaagctccatgtgagaattgcccggctcaagaggaaatattcctcttgaaatattgcccgggaaagcgcaaaagccgagctgtttcgccaaaaatatttttttctgaatccgcatcgattttgttgtagaatggtgccgcatcttgtaaaatagcgttagttatttataggggagagttggtatgtataaaggtgttttttacttgttctttgtcgtggtttttttgattgcgtttgtattttcgaattttaaagacagtttgctgacacacttttaaattgggtgattgaattagaacatgcaccctcttttcttcataacctaacagtgtaataaaagttaatggagaggggatttagcatgtttcatcatcattgttgcagaccaaacgtgatgccgccgattgtccatccgactcattgctgtgaacaccattgcttttctaacacggttgtgccgcatattcatccgcaacatacaactaacgtaaatcaccacaactttgagcacgttcattactatccgcacactttttcaaatgttgacccgacaactcaccagcattttcagtgcggaagcccttgctgcgatcattagtattgaacgcttaagcaagatcggttaggatatcagcaaatcaaaatggggcccgatggggagccccattttttaagcaggtgattaattgaaagtattagccgtaacggggtacaagccgtttgagctcggtatctttaaacaggatgaccgggcgcttgtttatataaaaaaggcgatagaaaccagactcagaagctttattgacgaaggcttggaatggattctcatatccggacagctggggactgagctttgggcggcagaaacggcgtacgatctcagagaagagtatccggaattaaaggttgccgttatcacgcctttctacggccaggaggaaaagtggaaggagccgaataaagaaatgtatgaagcggtgcttgctcaggcagattatgaggagagcctgacgcatcggccgtacgaaagtccgctccaattccggcagaaaaacgcgttctttattgaaaagtcagatgcgcttttgcttttatatgatccggaggtggaaggatcgccgaaatatatgctgcagcaggcagaaaaacgccgtgaaacagacggatatccgatttattcgattacgatggatgatctccgtgccgccgttgaggaagaagatttctttacataacacgtcagagaatatttgacaacgggacgtgtttctgaataaaatataacatgatgattcacgatatgaggtgaaaaagatgcttgctgataaagtaaagctttctgcgaaagacattttggaaaaagaatttaaaacaggcgttagaggttacagacaagaagacgttgacaaatttttagatatgattattaaggattatgaaacctttcatcaagaaattgaagaactgcagcaggaaaatctgcagctgaaaaaacagcttgaagaagctagcaaaaaacagccggtgcagtccaatacgaccaactttgatattctgaaaaggctgtccaaccttgagaaacatgtattcggcagcaaactttatgacgaataaggcagatgcacttgtcaaatgagacaagttgctttataatgaacaagtgttcttaacgttcgggtaatcgctgcaggtctttgaatctgtagaggaaagtccatgctcgcacggtgctgagatgcccgtagtgttcgtgcctagcgaagaaataagctagggcagccttgataggctgacggcaggaaaaaagcctacgtctccggatatggctgagtatccttgaaagtgccacagtgacgaagtctcatcagaaatgttgagagtggaacgcggtaaacccctcgagcgagaaacccaaattttggtaggggaaccttcttgaaggaactgaacagatagaaggacagaatactttctgtagatagatgattgccgcctgagtacgaggtgatgagccgattgcagtacgacggaacaaaacatggcttacagaacgttaaacattattgatatgacaaattagagctctcctttaaaggggagcttttatcttgaatgaaacgaaagcttaaaagagacagggtgatacgatgaagaagtacacactaatagcgacggcgccgatgggaattgaagcgatcgtcgccaaagaagtgcgtgatttaggttatgaatgcaaagtagacaacggaaaagtcatttttgaaggagatgcgcttgcgatctgccgcgctaacttatggctgcggacggctgaccgcatcaaagtacaggtcgccgagtttcaggcaaaaacgtttgatgagctgtttgaaaaaacaaaagcgattgactggcgcgcgtacattccagaaaacgcaaagttccccgttatcggaaagtccgtgaaatcagtgcttgccagtgtgcctgactgccagcggatcgtcaaaaaggcgatagcgggaaagctgaaacttcaatcaggaaaacaaaatgaatggattgaagaaacgggacccgagtataaggtggagatttcccttttaaaagataaagccgtacttacactggattcatcaggaacaggccttcacaaacggggatacagggttgatcagggcggagctccgattaaagagacgctcgctgccgcgttaattctgttaaccaactggacgcctgaccgtccgttcgtcgatccgttctgcggttccggcacgatcgccatcgaagccgctttaatcgggcaaaacattgctccgggttttaaccgtgattttgcttcagaagactgggaatggatcggaaaagaactgtgggacaaggcgcgccttgaagtggaagaaaaggcgaactatgatcagccgctgcagatttttgccagtgacgtggatcaccggatggtaaacatcgccaaagaaaacgcagaagaagcgggacttggggacctgatcgaatgcaagcagatgcgagtgcaggattttacgacgaaactcgaattcggcgttatcgtcggaaaccctccgtacggcgaacggctcggcgaaaaaaagcaagtcgagcagatgtataaagaaatgggccgggcatttgaatctcttgatacatggtctgtctacatgttaacgtcaaatgaacaatttgaagaggtctacggaagaaaagcaacaaaaaaacggaagctctttaacggttttatcaaaacggattattatcagtactgggctaaagtgcggccgcagcggaaaaagccgcaacaaagagaagacgcctgatacagcgtcttctccggcatctttacgttttattctgccattaccagcggtgcgcttttgcgttgctccgtaaaataatgttggtctgggacatttcggtgtggccgttcacctgcgatttagagcgtttcggccgcgtccaattgtgatgaaacaattcagaatgctgatctaatcgatctttataactcatgtaaccatcactcccggatagaataattttgtgaagatggatattcgatcgaatatctgttgtagtttgtgcaggtcaggtgcggatcattcaggatggcatgtatagaaagtgaagcatcggcatagaatgatgattatttctatttgagaggtgatcttattttatgctgaacagcgagcacttcagtaaaatacaaaaggcgttagacgcaactgctttccggctggaggaagccggagctaagttcggtccttccgtcatgacacacgcacaggaagaacttgaaaatgcggtaaaacatacacattcaacagaccatccgttcctatgtacacatatcattaaccggaaatgataatgacaaaaacttggcgaggccaagtttttttgttgtattgaaaagggttaaatgatattatagatggtctgaatgccgaatagttaggggttggagttgggtgacaacatcacgtttgccttttgctttaacaaaagaaaagaatttttacgaagaattgaacaattggattggtgacgtgttttacgatatccttcccgagaaaggctttgaccttcgggatgagcaggtatttatggcgtttcagcttgaacgggcatttaaagagaaaaaggtcatgttcgctgaggcaggagtcggtacggggaaaacgctggtgtatctgctgtttgccatcagctatgcaagatatacgggtaaaccggccattatcgcatgcgccgatgaaacgttaattgaacagcttgtcaaaaaagaaggcgacatttccaagctgacagaacatttggatctgcagattgatacacggctgtccaaatcccatgagcagtatctctgtctgaaaaagctggagaaaacgatgcagcgttctgatgatgaaaagtggctggatctttatgagtcgctgccttcattcgtacacgaatcacaagcgatgcagcgcttttatccgtacggcgaccgcaaacagtacgctgatttgacaaatgaagagtgggcaggcgtcagctatgattccttccaagattgtttaacatgtgatatgagacatagatgcggtttaacactttcaagagatcattacagaaaatcaacggatctgattgtttgctcccatgatttctacatggagcatgtatggacggaagaatcacgcaaaagggaagggcagctgccgcttttgccggatcacagcgccgtcgtgtttgatgaaggacatctgctggaattcgccgcgcaaaaagcgttaacgtatcgtgtgaagcagtcgacgcttgagctgtttttagagcgtctgcttcaaaatgacatcagagaggaattcgccgaactgattgaagatgcccttgccgcaaacgatgagtttttctatgtgctgtcagaggaatcgaaggaaatcgccggctctcaccgattggacatccaaaacgaccagcgtgttaagcgtgcggctgacgaactgtgccgtctgctcgataaaatcggcgaggcgctcgtatttgaatcggaaatgtatacgattgataagtacgagctgtcagttgtagaagaatacgtcgaacaaatggcatattcgctgtcgctgtatcaaaaggatgccatcagctggcttgaaacgcgggatacagactcaacgtttgtcgttatgccgagaactgtagccgaagttttgggagaaaaggtcttttctaaaaagataccttatatcttctcatcggccactctttctgagggcggttcatttgattatatcgctgacagtctcggaatccgtgatcctttatcatttaccgttgaatctccgtacgattacgaggagcaaatgtctgttgcgcttcacggtgacatgacgtctgagcagaaaacagtcgaaacgattgaaaccattaaggagaatgaaggacgcaccctcgttcttttcccttcctttgaagacatgaaggaatttaaagaacaggctgccgcgtgggagctgccgtatccgatttactacgaaggtgacgaagagatcagcagtctggtcgaaaaattccagcgggatgaagaatccgtgctttgttccgtccacttatgggaaggtcttgacattcccggtgactcgctccggaatgtgaccatttgggcattgccgtatccgcctcatgatcctgtgtttaccgcaaagcggaacggagcgaaaaaagatccgtttgaggaagttgatctgccgtacatgcttttgagagtccggcagggaatcggccgcctcatccgttctaatcaggacagcggaaccatatccatttatgcgggcggagaaagtgaacgggtcctggccgaagtcaaaaaggtcttgcctgttacaccgaaaatcgtataaaaacaagagctgcaggaatcttatcctgcggctttttttaatccgggaagttgactttataacggcgttccattagcctgtaattgatagtgaaaagggaggggaacggatatggatgtacatacatatgaaaaagagttttttaatctgttaaaaagagtatcccactatgaagaagctattgcgctcatgcattgggacttaagaacgggagccccgaaaaaaggctctgatgaccgggcggaaagcatcggacagctgtcggctgacgtttttcaaatccagacatccgaccggatgaaagagctgatcgacatccttctcgtgcatgcagaagagctctctgaagatacagtgaaagcggcggaacttgcgaaaaaagattatgatcataataaaaaaattcctgaagatgagtataaagaatatgtcattttaacatcgaaagcggaaacggcttgggaggatgcaaaggcggcctctgatttctctatgtttgctccgtaccttgagaagctgattgattttaataagcggtttatttcttactggggctatgaagatcatccatacaacgcattgctcgatattttcgaaccgggtgttacggtaaaggtgctggatcagctgttttctgaattgaaggaagcgatcattccgcttatcaaaaaagtgacggaatccggcaataaaccggacacttcctttataacgaaaacgtttccgaaagaacaacaaagagacctctccttgtatttcttaaaagagttcgggtatgattttgacggcggccgcctggacgagacggtgcatccgtttgcgacgacaatcaaccgcggcgatgtgcgggtgacgaccagatatgacgaaaacgatttccgcacggcgattttcggaacgattcatgaatgcgggcatgcgatctacgagcagaatattgacgaagcgctgagcggaacgaacttatctgacggtgcatccatgggaattcatgaatcccaatcgttattttatgaaaactttatcgccagaaatcaacatttctggaccgcctattatgaaaaaatggttgaggcttcgcctgatcaatttcaagatgtgaaaagagaggactttgtacgcgccgtaaatgaggcgaaaccgacctttatccgaattgaagccgatgagctgacatatccgcttcatattattatccgttatgaaattgaaaaagcgattttcagcaatgaagtgacagtggaagaactgcctgcattgtggaatcaaaaatatcatgattatttaggcattacgccgccatctgacgcaaaaggcattttgcaggacgtacattgggcgggcggcgatttcggctatttcccttcctatgcgctcggatatatgtatgcggcacagctgaagcataccatgcttgaggatctgcctgaatttgatcaattaatagaacggggcgactttgagccgatcaaacaatggctgacagaaaaggttcatcagcacggaagacgcaaaatgccgcttgacatcataaaagatgcaacgggagaagaattaaacgttcaatatctcattgagtatctcgtcggcaaatattcaaatttatatttataaacgaaacgcccggcatacaccgggtgtttttctaaaaattctaaaaagacgaataatcgaaaactaattctttgtaaaagttcggaaatattcaaatttcactatgcaaaagaagtgtatcttgttataatttgattaatatcatacgaacactcatataatcgcgtggatatggcacgcaagtttctaccggtcaccgtaaatgtccgactatgagtgagcaatggaacggctttattcggccgttacgtgtagatcattcggcattgcttgctctttttttggagagcgggcaatgctttttttattttttataagcgggggtaatcattgtggaagcattaaaacgaaaaatagcagaagacggaatcgttctttctgatcaagtgctgaaagtggattcttttttaaaccatcaaattgatccggttctcatgcagcagatcggccgggaatttgcgcggcgttttgaaaaagacgagataaccaaaatcgtcacaattgaatcttcgggcattgcccctgcggtaatggccggccttgaactcggcgttcccgtcatctttgcgagaaaaaggaagtctctcacgttaacggatgatctgctgacggcgtccgtctattctttcacgaaaaaaacagaaagtcagattgcaatctccggaaatcatctctcgaaagaagaccgcgtgttaatcattgacgactttttagcgaacggacaggcggcagaggggcttttgtccatcgtaaaacaagcaggcgcagcggtttgcgggatcggaatcgtcattgaaaagtcatttcagccgggaagagacgagctggtaaaaaaaggattccgggtcgaatcactggcgagaattcaatcgcttgaagacggaaaagtgacatttgtacaggaggtccgttcatgaaaaacggctatgccaaaacactttccctcggtatccagcatgtgcttgccatgtatgccggcgccgtcgtcgttcctttaattgtaggagcggcactgggactgaacgcagaacagctgacatatctcgtatcaattgacatttttatgtgcggggcggctacgctgcttcaagtatggaggaataaatgtttcggcatcggcttgcctgttgtgctcggctgtacgttcaccgcggtagcgccgattatttccatcggtaaggagtacgggatttcagccatttacggaagcattttggcatcgggtctgcttgtcattctgctgtcatttttcttcggcaagctcgtatccttttttccgcctgtcgtaaccggatctgtcgtaagaattattgattgagtacgacataaacctagttatagtagaccttgatattcaaattcttcgtaccatctcccaaatcctcgaccgtatacgttacatgactaatgagcatctttagtattaagtttatttcagagttagacatcccctcagtagactcaatcatctcctgcactttatgatgactccatttttctttttttgtctcagcgctaagagcattttgaaactcagtagatgcaattaattctgctaaatcattttcagctttttgaagtgtctcttgtgaaattttcagcttttctttgtactctgttttactgatgtccccatctaagtacatttcctttatgcgttctattcttccctttgcctttttaacagctttttctcttaaaccaataagctgagttgtataagagtcatcattaacatcttgctcagtaggggagaagagagcttcattgtatttttttatttccttcataattgactggaacaatacttcttcatgaattccttttgtttcttcgcattcttttgttctttcagcagattttcgtaaacactttctaacgtgttttcttctgcctttgggttgttctatagcttgtgctttatgacaataaggacatctaacaataccagaaagcctgtgggtattcatatttaaacgtcttccagccactttatatgttctaagtttttctattctattcaggattagggcatgttcttcatcggttttcatggtttcatgatgaccttttgcaattaatacttcatctagatttttattttgaacaatactgttgttgcttttgcttttcttgtatttaccaaaccatacataacccctatgaaaatcgttggacagaatttctgaaacaacttctccgtaccaaatggaacggccggatggggaagggactttcagttcgtttaacatctcagcaattactgtgcaagaatattcctcttctaagaaccatttaatcatcattctatatatttttttcttttcctcaacaactactgcagctttgagattcttgtcccacttataaccgtatggaacagaccctgaatgcagtctgccttctcttgtggcatttttctttccgttaatcgttcttcgttttattgctctatattcacttcgagcaattattgattcaaactcagaaagcatttcgtcgccttcaattgataaatcataggttttttttggtgtaataaacaatgttccactctgcttaaatgcttcaagtatacgtcctgaatcaatttgtgaccccctagagagcctgtccattgctacagcacaaactgcatcaaactcaccattttcgattcttggcaataataatgagaacattggtcgctcatcaatagtctcacctgaaacaacttcttcaaaccactgaacatttttaaagttctctctttttatgagatattctagctcatttctatgtttggcgagtgtatcttctgaatctctgtcttctctggattttcttgaataaactgctattcttgaattttcgtgtaacgccaagtatttcatcctttcttcttattgtaagtgtagttagattatatcatgtgcattggaatttctttataaaatcctcattttaacgaaacattttagatcagcttgcttattaatctaatttaaagtatcctaattgatgtatcataggggtttaacagccactatagaccacagagtccctcacagagctctgtggtttttatttagatagaatatacccaaataaaaaaagaagcctcagagggcttccgatggattaattcttctcacatgcaaagttgtcattatcgcgatccatcttagatgtataagcagggtgagtgcttggtacgccatgcgggtatttctttctcagctctgtgcagtttgcaaagtgttctgttcctccagcagaaggggaggcttgtgcagagttagaagagctgcttgatgctgaactgcttgaatttgaattgctagggttcgatttatgtgtctcggattggtgtgttgtaactgacttttgaaccggcttagatacacttactgatttcttcggtttcgttgcgcagccattaaatcctttatcagtcgcatatccattcttactccaaatcttcaagtctttatctttcgcagcttgctcatctttcttatacgtgtctaaatacttcgtgtttggctcatatacataagctactcgtgctaatccttctttaagcagtgtttcttgtactgatttgccatctgcgtaaacgtaagccaacattctgccatacttatctgtgcgatctcctttatcaaactccagttgaagcttgccctcgttaactagctgtttatttcttgctgaagcatcctcaccatatggttgtacgcaagagtttggtttcttagtttcaggagtgtcaacaagcaaataacgaactgttttgacttcgcctttatagttaactttaatcgtgtctccatcaaccgttctgttaagtgttacatcgactagctttttcttattgtcagatgtctttttatccgacgaatccttctttgaagcattttcggctttttcattcttgtcattattgcttttgtcgtttgattgagagtctgtctttgtctcttttgtatccttttcttcttgttgcgttgttttagccttatctgaatctgttttatctgtagaagcagaatcagacccacatgcagccaaagaaaagcttagagataatgcgccaatacctaacaaccatttcttcaatgtaattcccccaaatttgtttgttctgtctctatatcggacaaaccttcctaattataaatataaaaccaaagattgtaaatttgattttgtcattttaaaacactcaaataaagttgtgtggtaaaatttagtggtctaaaccttagaggagggaaagttatatggaagaagggaagttaattcaaatgactcttaatggaataaaggaagctgtttctaaatacggaacattccctatgtttcatcatggagggtatgtcatggaagatgctacttttcatttcaaagatcctgctagtcctcaagaaattagcgatatagaacagaagctaggtgttaccttccctaatgactataaagagtttttgttacagcacaatgggatggaaatgtttgatgggattgaaatacttagcttagagggaatcattgaatataatgaggttcaagatttcccagagggatacgttttaattggatatcattttgatggaagatatgtcatagacacaaacaaatcaaaaaatggattaggttatatgctatatctagactcaattgatgatattgaagatgcgattaacttagattcgaattttgaaatatggtttgatatgttagtttcttccaatggaacgaaatattgggaagtgaatccgaatatccgagagtattataaactggtttcagaataaaaagactccgcataggagtcttcatctacgttcatctacaattttacttcttttttgtataagaagcccaccatggatttacttctttcctgtgaaaattcacatcgataggaattaaattgcttgtctgatttcctccaccgtactctctaggtagttgatgatgaatctcaaatttcacccaagtttttttgccgtattttttatcataccatttcctatatgctttgcgttctgtagttccccattttactcttttatcgctaggcacccatttaataaatgcattaggtggagctaatatatttaatcctgattgcttatctgtgtaattggaggggaaaaacattcccttcatattcgttaggtataatccttcagtccaggatatcgttctaacagttggttttttccctgcccaagtagcaattgcgccgccagtatacttccaaaatgttgttttgtttacattaataaattgatgaacttccgatccctttttcacttgaggccctacaaaggtctttctaatagtatgggggcaagtaaactgtttattataataaccacttttgcataaaccctggtgtacttctgctgacgcaggaggaatccctactatttttgaaatttcaactccgtgcatcactttattaacttttccacctaaaaaagtgtgactgaaatagataatactttttgcttttttctcaacagttttccgttggttttcagaggtgacttgtccagatgatgtctgattaccatctttgtcataagctatataagtctgatatgaactttcaacatccattccttgttccttagcaattttttgcaacttactttctgatccagctaattctcttttagaggaatcggtgttttgcggtttttcgtttactgttgagatacgtttgtttaggtcaatgccagttgcattattatcagtgatttctttgtttgccgttgcctttacatcatggaggggatagcaagagaataataaagagagagctattacaactaaccaaatgctttttgacacatacttcataatggtttacactcctttttcttctgtttaaacctgctatgagtatctaagatgtaaataaataatatattttacaattaatacctccttccgcgaggatagtatcaccttttccattttttatcaactgaattaagcctattttaagattttgttaaagttcaaatctcctaagaaagagaccttcgacaaaaggaagaagctctccttacatgtaattttatgtggtaaaatttagataagattgagtgggaaggagacagatatgaaggtatttgaagcatcctcgttaatctcagcagcggaaaagcgagcaaaagaatacgatcagattagagaacaatttatcaatctcagaaaagcatttcaaggaatggctgatttagatgacagcgagttttcaggtaaaggtgctgataacattaaagcattcttccaagatcacgctggtgttacagacagctggcttgatctgatcgatatgaagattgcttttcttaacagtatttcaggaaaagtagctgatgccggattagccgattcgtttgtggaagagtcatttttagagcatgagttgattcatgcgaagaataagtcaaaagccatcatgcaagagcaacggaatgaaatgagggatattcttaatgagataagtgatattgttcatcttgatgttttctctacagaggatgtcgatcaaaagctggattcagcagataagaaacgggacaataccatacacaagctcggaaagctcgatcatgatctaacgaaggaatatgcagaaaccgaagcgaacgagcatttcatccaagccgactttcaacagcttcaaaatgccacgggtaaagggaaaaacgcaacaccacttcactataacgccaaggcgtacagagaaagtgacatacataagaaaaaaggcgagattgcaagacattcggatgcttatttgacgattaaaaaggaagaagcgaaagagcgggaaatcaaggatctgaagaaaaagctcgctgacggtgtgaccgatccggatgaatatttagaaatcgcgaagaagatcggctatgaaaaccttgaaccttcccaacaacaatatgtgatgcagcttgaacaagcaaaacagatggaagaagccggagaagtgacttgggatattttaaaaggagccggcgttggtttatatgatgtcgggaaagacacggtaacaggtttatggcagctgatcagcaagcctgatgaagttgttgaaggtatcataggggcagttgctcatccgattaacacgtataattccatttcaacagctattgaggaatcgtatcaaaaagatatggtaaatggagatgcttactccagatcaagatgggtgacatatgcgataggtacggtagttacctctgtagtaggcacaaagggagccggttctcttacaaaagctgacgtagcaggaaaagtcacctctaaagtcagtaaagcaggccaaaaactgaaagatgtctcaattgctgatttattgccttataatccacgttacgatgttgttccggctggaggagttccttataatgtagttaacggtgagaatttaaaggatcgtctgcttcagttaataaagtccgccaatcctagaacaaggttgcctagaaatcatgggagatgggaagggactcctggtaacggtaaatggcactcagatagacctgacgttaatgcagttactaaaggagaacccgtcacttttatagatggcagaccggtttttacaccatggagcaaagggacgattaagtttaaatcaggagaactgaaaggtactaaaaaggattttccagcagtttataaacgtattcaaaaaatgaaaggctttaaaacccaaaaagaagctgaaaaatggctgaaagaagtagttagattaacaccgcatcatttagacaataacaccatccaattaatccctatggatttacatggtaatatacctcacgtaggttcggcatctgatttaagaggaggattttaatgggtatacaggcaatcaagaaaaaaatgagtgaattttatttagatataagacttgataagaacataaattctcatcaagtccttaaaaagtttgaggacgaaaattctttcgacataacagatgaatataaagagtttctcaatttatacggggaatgctggatagaggaagataatgtgtttttccctgttttagaggacaatccactagcagataacggtaatctccggttgggatatttctacggtcttaataacaatgatgctaatattatcaaattaaaagaggatctttcagaacaaatgccggactggattataccgattgctgatggtgacggaggagatcaaatttgtcttggtgtgaaaggagaagcaacaggaaaagtttatttttgggatcatgaattgacaaatggaataaaagacacatttttggtcgcaaattctttctctgacttcattcaaagtctgtttattgaagagacaacagatgaagacgatggtattttatctattgagctagatgatgatttattaaacagttaagcaaaagtattgcaattgcatgatgtagcagcataagtgtccttaggcaaagtgaaagtggtttaatccataaagcaatagtattgcaaataccatttttatgtggttataattagtgtagatgatacagttatataattattttttgcatttgatttgtggaaatgcataaaataaaaagaccagggtgttggtagcaccccggctctgtacaaaaagctgcccatcaaagggcttgctcagcagttgttcatgataggcctaacccttcaggtttccaggctcaagggaggtctattttttatttatatacgtcaacagggcgattataaacgacccgaatgcaagcattaacattaatgcctgaaatgttgacataagcatcaccccctttcgtaggggatgagcaagactcccttgagtgagcatgctttaatgtacaggaatcattatacactaattccaaatatatgtctgtgattattggagccttattgacaatagacaagttataatgtagtacttttctttttgaaatttgtgttataagatatattaagattttcaacaagagaggaaatttatcatgaagaaagaaattttgctaattcataatggctcaagcattacatatgcagacccacatgaagctgctaggagttatgctaaagctgtcattgatggggtaaatcctaatgaaatagaactatatactgacattgccgtaaatcttaaagaccaagctaaactgatgaaacaatttaaccaggaactatctaagattgtaaatacaagaattcctatgatggaagaaaacacaaaagagctaagcaatgaaatggaaaattcacatcaaatttataagggaatttcaaaagaaagcataaaaagaaaaaggattagaaaaacgaaaataagcaggctataaaaatagcccgtcatttgcgtgatcagaaagaaaagcaatactttgtgccggagtttttaagtgtgaaaataaattactatgtccccccttacaagcatacattgtgatatgtaaggggggatttttcttgcctagataccggagcgctcttcgcaagagagggcctttgccttttcggtatgtgttgcttctgtcgtttgctttttttatcatatcgacggtcatcagcctctggatgatcaactcctcaatcaaaccggtgctgatgaacataggagaaatggaaaccaaacgggtggcgacagaggtcattacggaatccattgaagaatacatgtctcacagcgacaatgtgaaagatatggtcgatatgaaaacggatgaaaacggaaaagtcacaacgatggattttaatacacaaatggtcaacagtatgaaggcgaaagtgacaaagcagcttcaggctcatttgaaggaagcggagtcgaacaataagcagcatgaaacggaaaaaggcgcgaaaacggccgatgaaattatgattaacatccctttagggcaggtcacgggaaacagcattctcggaaatctggggccgaaaatccccgtgcgctttaacctgatcggtgatgcgttaactgatgtgaaaacaaaaataaagccgtacggcattaacaatgccctgatcgatatcagtatttttgtggaaattaaagtgaaggtcattattccgtttgccagtaaaacatcagtcgtgacaaataatattccggtctccattaaagcgattcaaggagaggtgccgcagttttataacggaagcggcggatcaggtgtgacgccttccatccagctgccgaatgaaaaaaaggagaaagacaaataaagacacacagccgcattttcttctggcggctgtttttactttttcctgcggatttcttgaaactgaactcaagtatcgactagagcagcccataaagcttagtggatacttgctgaatagtcatttccaacaattacatcgaactattgttcttatttatattgaataaagaacatttgttctgttaatattagatcaataaaggagtgattcaaaatgcttagagatcgaggggcgatcaaatggacttccatgatgcttccagaacatttaacgcaattaaaacaggacttgttagatgtttcgaaaatggagaagccatctttagatgagcaacaaattgaggagattgacatcctggtttctgaagcaatggcgttgaataaagaactaaagtttaagctctttaaagaaggggttgctgaggatttaatcggtacagttcaatatctcaattacgaacaacacaaattacacgtaaaagatcatcatgatcaaaccgtatacatcaccatgaatgacatcataggagttgcttacaatgattgattactcacagtttccacgtaaaaatatactttgtgtagatatgaaatccttttatgcttcggtttcagctgtaacaatgggattgaatccaatgacatgttatctcgctgtagtcggaaacacggatagacagggaagtgttgtcttagcagcgtctcctgcacttaaaaaagattatggaatcaagactggctcccggttatttgagattccagatgatccaaaaattcatatagtaaacccgcaaatgaaacttttcatcagagtttcaactgaaatcactaaattgttttacaggttcgttcctgaaacatgtgtgcacacgtactcaattgatgaatcttttttagatgcaggaaaagaaaatcctgaagtcatggcagaagcaattcagagcagtatgaagagagagtttggcttagtttgtactgttggtattggtgacaatatgttgctgagtaagttagctcttgatttagagagtaagaaaacaaagactgggattgcacggtggagatatgaagatgttccaaataagctttggtgtgttcatccgttatctgaaatgtggggaataggagggaggatggagaggaatttaaaccggatggggatttcaactgttggtcaattagctaaatatccattagagctacttgaaaaacgattcggcattatgggcaatcagctttattatcatgcacatggaattgacctttctgaaattggagctcctttgatgcaagggcaaataagctacgggaaaagtcagatattacttagagactatacgaagaaagaggatatcaaggcggttctcttggagatttgtgaagaggttgcacgaagagcacgaacacataacaaagtagggcgcacaattagcttgggtattggttacagtaaagatgagttcagcggcggctttcacagagctaaaacgattgatttgcctacaaatatcacaatggatatttatcgatattgcttgatgttgtttgataaattctatacaggcaaaacggtacgaagtgtttcagttaccttatccaatattgaggatgatgtaaatcaacaattaagtctgtttgaaaaagataatgagaagagaagaaagcttggattcgttatggacgggataagaaacaaatacggatctaaagcgatcttacgagctgtttcttatacacctggaggcacagctttgcatagagcaggtttgacgggtggacataaatcatgagaacagagagcagctccctctgttctccttacaaagtcattagttttttacgtttcggctctttcagcaaccttgaacgtatcattttgttgttggagataggaagcacccactgttccggcaacgccgaataatagaactgcacagataaatagtttagttttcatattgcttctccccttttgatttgtcttcttgcttcatttgccaaacgataaaattcaactgcaccccaagcatcctgttttccagtgagaaaatctgctacagagacaccatagctttccatgtcagggtatatacttctttctttgaagaactcgaatgttttcctaactaagtctaaatcatagtccaagaaaagtcctttaaccatttttaacttttcaagtaccatttcattgttatgccgttcagccaactgtttggcctgttcataaaatttttttgcgttttcaatgtcattttgccttccctttaagaaggagataacaaataatgttttagcagcgtaatcatgattttccggctcaatgatttgaagtgacttattaaagtgaaaaaatgctttatcaagttcttccatttgattataacataatccaatattaaacagtgctgaacgcatcaaatgcccacgattcttttcacttttgtttagctctactgcttcctgatacgctttgtatgcttgctttaaagcttcatcaaacttcatactgtccaataaattaccaaatatgacgaattgacagcgtaccttttgtaccccgtatgtagggctcccgtcaatagcaggttgctttttaaatatatcgtaagccctcatggcataattcattgaaaaataagtctgtttcatgtggtaatacacttctgacaatttaaaataaaattcagctttttcaacttcaatatcttcgctctcaattgaatccaaatatctctcagcttgtctatagtgattaagggagaatgccaactccttttgtctaaaatagaacatgcccatgaaaaaataatagtaatattcgagcattccagttaagttttcatggccttcgtatgcttttaactcaccatagtttttctcaatgtcttttatagcgttaggatacatatatgccaacattagcttatgtctaaactcaagtagggagtagtatagtaaaacatcttggttttcttccataatttttatttcctgcataacttctttacgcatttcttctgctctaccgacccaattctttttaatagccacataccaatgattcatctttgttgctactaaatcataaggaatgaccttttcgttctccaagtcctaaacccctttcaaatccattttattatatagttgcattggaggaaagaaatgtaaagggaatttgagtgaaaattaaaaacaaatcaataattcgattatgaacgaaacgaaaaaaataccctcctcgttagagaagggtatatgatcagtttgctgttgcttttagagaagcaagccactcatctaatgttccagtgaagccttgttgaacggctaattcatatgctgattttccatctttaccggcagcaccagtagctcctttagcaccggttgcaccagtatcacctttgtctcccttagcgccagtagctccagtgttgcctttttcaccttttagtgaagctaaccattcctctacagttcctgaaaaaccattgtccactgcgatttcataagcagacttcccagtgacaattgagacattaaccattggattgaaaaaactcatttatgcgcccccaaaaagttatatgtaattcctgactcagaaattttgaagcttgtgataggtgaatcgtgagcgtccatttgaaagccttgtccagcccttaaatagataggatctccaccattgattgatacgtggcatttctgatcattcgaaaagctgaacttatagaaagaatatttaatcgtccaggttgcaggtggggaggggattacttcatggttagattctgacttctcaagcattggacttccgatatatccagatcctatttgcataatcaacaatcattcctttcttcttgaaaatgaaaaaaagggggagataaactccccaagttattttggctctgtgtattccatggcttgatcgctgtctgagatacctgtagtggttggatccactacaacccccattgcagttagaaatgtaagcaaagcattaaatttctcagtaagatcatcgctaaacacagaaatgtcgtatccaaatgcagatgcaattgcttgtgcaaacaaaagagttgcagagaagattgcaaccaggaatgttttctttttaagtcttactttccagttaattttagtcattaaatcgtctccttataaattagctaatttggtgatatcaacaccagcgatctctgcaccaagcagtaagagaataattagaactaaaatctttaatgtcttgccgaatgttccttctaataagttttgaagccattttgtttgcgactgattaacttgctgaaactcatttcttagtccagctatctcagtggtgaacaaattttttgtttcaacaaggtttttttcctgattctcaacaacagtggtaagcctaatgagcgattcacttgttgttttttgtgtttccaacatgatttttctatcttctgcttgttctttaagacgttcttttatatgagcgacctcggtctttaaaacttcatagttttctttttcagccacaatgcaatcatcctccataaaaaataggaggtaatgtcacatcacctcctaaataatcattgatacactttgagctacaatcattctcaaagatatttaaatatatttagatttttgagccaaattgtcctgagatgtagcctcgtttacctttgtagataacttcccagtaacccttagcattgtttaaccctttcactgagccagaaatgctgacggtatcacctagctccacagtgccgagattcttcgctttgtttttatcaggtctgtccattacgatagcagcgctttttactccgacaactttaatcttgcctacagatttgattccactgctatcaggcttagaagtgggtttaggctttggggttgattttccaagctcagcatcacttttaatgtatttcacatttacatatccgctgtatgtagcgcctttggagtttgtatatttgatataaccccaaccattttgagttgatcctttttggtattggacagtggagcctttaggaagggcaagtacaatagaggagttcgcattgcgctgagttctcacattaagactgtctgcgataactgtgttcttaacataagagccatttgttttaacgacttttgttggctttgaagatgaggaagaagttttcccgccgagtgctttcaattcagcagcaatagaagctttaacagcattccaacgtccttcatcaagaactcgatgtgggcaatacttgccagaccagtcttgatgctttttaactcgatctatgccccagccacgttctttaaggagttgtgcaataaacttaatagccaacgcttcagcttttttatagcgctctccgcctgatttagagtagcaaacttctacaccgatggaagtccggtttcctgaattcacacctgatccatcacccgtatgccatgcattacgatttgtaggaatcccttggacaacctctttatcatctacagcaaagtgaaaagaaacttcattattgttaccgatcatataactaacttcattttgcgctggtgcgtcgttgtatgtattgtgaaaagtgatgaatgaagcagataatgcatatggacatttgattgaatatttgtctggtgatactaacatttgtctcgcttgaatagccatattaaacatctctcctaaattaaatttgagcacaaaaaagagagaaggggacaaatccctatctctctttatctcacgtatgctcttgttatctctgtttttgaatgccgtaaattgaataaaatttatattttaactagaacataaccacctcctttaattttaagggttacttaattaagcagatggcaatgccgtaaccgagcttgtctgaatatggagttacaatctccatagccttccaagagtaaaacctgtcttctgattttgtgccgattccataattaccttcaattcgatctcccacagaaacagtactgtccactttcacataaacctgtccaagcaatcctactatattccattcaggacgttcttcacgagggacgtaatctattttttcaatccactcagggtttactttaggcagcttcttaacatcaccggtttctgggttgaccacatcttcatatatgtatccaccaaactcattctttaaatatctaccttgccagtgaatatcagctcctcctagaatagttcctgcagtttcagagattactccgtgtacatcttcaccttttctcgccgggcgaattttagctccttcaagagtgacaattgtccctgtcggaattgcttttccgtcaagactttcaaaatactcagcgtaatcactaaaggtggctccgccattcatctttcctgccgatgttatatccccattcatggagtttagcatccatttaatatttgctctggacggagtagcgccatatccgccaaccaccatatagcgatcattttcaccaagttttacacctccagaagcgtggatttcacgtgatacattttgcccctcgatatgagaatcattggagttgtaaacaccgctacgagatccatctacagagcttccgcctgatgagccgaaaacgttggttcttgttccctttgcaacgcatcctccggtagtagctccaactaaagtggcatctccaagtgcttgaggttcacccgatgaagctaatactgcactagtatttgttttagcatagccagaagtcgtagccccacgtagaccgcccttgaaattattcgggataaacgtgtaggtttttccggcaattttactgggagtagcgtattgttcacacatcgcagcgctaatattagcttgtgaattcgtgcagtaaacacctatcgaacctgctttgtttgatcccgtcatgttaacgttattgatattgactgagccaactttacttcccacagcaataccaactaaagcagattggttaatggttacattcgagatgtttacattatctgatttttgagctccaccgattacatagatatcgttactcgctgttgtaaatcccgaaacagtgatgttgcttaggttgatatttttgcttttatattgggtggtgatgattgcagtgtttttataatcataggttggatcaccaattgcgttgaagttcgaaacgttgacatttctataagcggaaatgactagtgcgcgaggatttaaaccttgataaaggtcactgaaaataggatgttgtgcagtgcagttaacgacattaatgtcaaatgcacttgtggagattttttcggaggctaggtggaagccaatatgtctaaagtcgaaagcgcggatatcattttcggaatagcagtttattaagtttacgtttcttgctgcaggtgctctattgtgagctttgacttcaaaacccctgcaattttttcggctgtaacagttcacaagccatacgtttttagagccatcatcaatttcaaaaccgtttgaatttgaagctcctttgctgtgtgcggatccattagcgtcataggcgtaacagttagtgaagaagatgtagtctgaatagtgagttgtgaagccatcatcaccatagttagttgcagtacaattttcaatccaaacatatttgctaccatttggctgataatgatctgctccatcagaagaagagttccaaacaggggagcttacatcaaaaccgtgtacacctggattacgagcattgacgtttctaacccgaacaaatttagagttaacaatccccacacagtttgcatttgttccatttgtaatggtgttgtcctttttgtctaaattccaatcgaggtctaagtcttcaattaagatatattcgtttccgtttgtgtagtcgctattggttaacacacaagatgttccggtagcagttgggtgaagcttgataatagatcctgatccaacaccgtaaagtctgacataagaagggatatgtaatccttgaaccatataaatacctgcgggtacaaaaacttctcgcttcccgctggcaaaggcagctttgaaagcttcagtgtcatcagtaacaccatcacccttagctccaaaatcctgaacattgacacttcgtctgataaactcatttaagactttatcaacaattgttgcaccagctgcagggatttttgaaatgtctccaatagtgtttgtgatatctgttaaaccagaatcgactgtgcttattacgtttttaatatccttagaagctttatcaaaagcctcttgaatatcgtctgcagtatatctaatattatttgattttaaccctatggcatcaatgggtatccattgctctgtttcttcgtccttatagcccattgtgtttacgggaattaaattgtcgctcaatatatactcctccttatccttttctaatccaaaccatgcttccgtcagggggttctacagatggttttatcctcatctttttgggagcattgttcgttctcaaccatactgatctgatgttgtaaggctctacatagctagaaacaatgttgaaaccatcatacttatctgacacgctaatatttatccagtcgaaaccatcccatcgatattcaatgcctgtttcttttacagtgacagtccaaccaatttgaggggaaggataagtgttcaataaatcctgataggtgtacacaaacggcaagtaaatcttcctagtattctcaactacatactcataatctgatgttgcttgtctgcaccaatttgttatttcaatacagcgcttggtgacacgttcacattcagcaatacgttcattgatacgaataatggcatcttcagcatcatcaattaagccttgaagcgtttcaatgaccatatttccttgtcgtttaatccaaattcttgaggcagggaagaaggatgcgccttctccttgatatgcaaaagtaagtgatttgccttcatttgaaccattgaaaaagacaactcccataaggtaatcaaccttaaagtagttgtcttctaattcaccatcttcaatttctcgccattctttactgtcaccactaacctcgactctgtactcacggttaggtacttctgtaagtaagactcgaccattgtaaacagttaaagtttcactatagcttaaataagggtcatcgattgaacccttccttttttgagaaagggtagggtcgttatagagctgaggaaaatccaaactaaattcaccgtcctttcttattgtgtaattgatttgagcaattcttctaagtgcgcgactctctcttctaaactctgcagtctgcccttagtaccacctaatgtttgtcctctaataatggattcagctttcttgtcaattacgttgtaaacagacttctcatctgaaattgcatatacagaatatccttgccaccaatcttgagcttgaaaaactctaacccatgcttcaaaccaattcgcctgaattgattcattgtattcccctaggtcaccgaatgcgttatggggctgttcaggagagttactgtaaggtgggatgccaagttcaccaaagaagatcggcttattccatttatcataaaatgctttgatttccttgaatatattttgtccgcgtccgtataacggtacgctataaatagcatcaattagctgatcgacagatggatttcgattatcagttaattcaaagtaagccgctattgcaataatatcgactagtccgaatagaggattattcagctttttgttgtaggcagcaatcgtttcgggagcccaatcagcggttacccaataatttgttcggtagagcatctttccactgaataaactcctaacgcttgtaataactgatttccacttttctgttgagtcttccatatgaactaggtttgaagcaatgtataaaccgtctaatttaaattgttcgcattttttagcgaagtcttgcaggatgttgttccatgctacgaaccattggtctagatcagaaggtgcccaatcggtttcagctatcgttccatttgcgatgaaggggtagggttctaaaataatgttgtacccgtcatttttgagtttagggatcatatcccacgcttcgttataagtgtaatccacaacagttggatttgagtctgaagcatccacagcattaataaggataggaatagtgattgtatttaagtttaaaacagttgagtcataactaacatcagcataatatttacgaccaaatgcagaaacatttccgcctttccatttcaggggattgaccaaaaggttattgagctcaatgttttggacacgactatcatagtcggagagtttagtgtcaacttgtgctgctgtggtttcaactaactcagcagttttctggtcactggaaacccatttttcgccgtcataagaggaaacaacaccggtaaccgtattagtccataaatcgtttgcttctggctcttcgggttcagttgaggagacagtgtatttcgagccattaagcttacctttgacttctacagtagaagaggggaggtaggggttttctgaggggaatttaggctgtacaatatcagatagtattcgaccactgctatcaatggacgtctctactgtgcgataggcttggactccaaatgtatagtgtttatttgaaacttgaccggttaatgttgcaattcgtttatcataactaactgataaatattgttcagctgacatctttgcaccaaaaagataggtatcatctgatgtgtcagagtagcaatggataagaaaaccatcgatattgtatttatcctcatcggagtctggaaaatcccattcaattgatacatctacagatccattatcatttacaacatgagttatagcagtcccgtcatttcggatagttgggtttgctacgggtgcagatatacgatcatttcgtgcattgtaattggtcagtagggtatcataatcaatctttttcttattgaattcagttgatgctttcttagcagtatacaatgagcgtgcaaagtcttgttctatcgtagtagctctttttccattcgagagtgttacttgtatactttgctgctcaaaatcaaaattcattcctgtaagtgttgctttgacatcagttctaaaatcgtcattaactaatctgattatatctcccaggtaaattctatcccaaaaatccttttctttgttgacagtgaataagttgacaatgtttgttctgatgtctaccggaggtgtatttttctccccaagttcctcaaggcctttttcatacagctctgtttcatcaaaaatgttgtcattagaccaatcatcttgacggataaaataagacaactttttcattagcttttcaccgagaaacttatccatagataaccgatcttttaacactgctatttcttcagttatcttggaaatctgattggcagtggtggatatttcagctttctttgatgtaacttcaagttgtttggcatctctttgcttgataaggtctttcgtgtcatctccagctttttttgctactgtgatcttatctaagatttgttgtaattcaattttttctagggtgaagagggtattctcctgtgttgtttttgttgcttccagatcttttttctgatttaaaaggaggtaaaaagaagagccttctttatttacaagttcattgtaatctaaaattgcatggcacaaatcatcatccatgtaatcactatgcttaattacatttctcttttcatcacgttcaaaagggtagaggaaataagagaaatcatccaagtaactttgtccagtaggattgactgaattaataacaattccatctttaccggtaatgtctaatcgtgttacaacttcatcaatatcaatggtatcttccatatcaatcatgaaccttttaggagagaattggacacctttatacttggacacagtttcttttttataaaatgatactgtgttgttcacagtatcaaatataggcacagcctcaaaagtttctccaatgttctttaaaaactcatatcgggtagaggtaacatcaaatgagcggcgtttttcattaaaagaggggtcaataaagtctacagtaaagcaagttcctttaagacaatctgtggcaacttccaacagatttttagagatgccttcatatgatttgattttgcttttatgaagaatgtagggaagtccttgagctctaacttgtattgtttgttcctcattttctgactttgtcaatccggttattacaaaccattcaactctgtttaagaactctgccttaatgagataccagccttttatgagttctgccacatggtttggcttcatcttgaaattatatcttgctttaagtgggatattaaaagttagatcgtggagttcatcaaaattcaaatttagagaggcgttagagaaatctactatattagcgattttctttttatttggttttgctaaagaaaccttgagatggcctggtttaaaatcgtaaatcaataaaacatccccttacaaatacttatatctgtatataaaccggatacaacattcgcccgttattttaactctgtttatcccccttgttaaaaaaacatactgttcattgacttgatcataacactcatacccagtaacactggaggtgatcagctctttattggcatctacattaataacttcttgatgtttaattgatgtgaattttagaggttctttataagctgtcaagttttcgactgtgatgtctccatcaccgatttttttgaattcaagagagagtgggatatctaaatcccctatatttttaatttctatattattagaacctgatgatatgtcataccaatgggtagttgtttctcgtccatacctataaggaaatactttcattgtcagcttcacatatccgtcattagagcagttgtgtaccaaatctgttgcattcactggcaaagcaaaataaatgatatctaaattactactgaatgaaagaggcttataatcatctacatttagccaacgtgcaactcttcgaatattttcttcatctaaatgatcttctatgtaaaagtttaaagggatttcatatggttcacgtttaacactgtctacatacggttcagaagctgatcgtgtatatgtttcatttactgttctattcgctacgaaggtctcttccaatagtccgccctctgtgtttacattcactgccccaatttcataagaggggatatcatcgaacatgaaatattgactttctctaatcataaaattccacccttaccaatcaaaaagcaagctgaagagcctgcattatacagactcttacatgcttccatttaattttataacttctttcttgatggtttcgagcattgttctggctccagtttccccaccagtaagtttatcaacattgaaaattattggtgtgttaattgttttatcaccattagaattaacggttgtggtagggggcaggttagcagtcttaacatttggtatcaaactattagataggctcgcttggttaatattcggaattattgatggaatagaagtaatccctttgttaatcaaagctgctaattttccaccttgcccccatttaggtgtttcattattcagatcgttatcagacagattgcgaacatactttacagtttcaagcatgttcttggtgtcagtcttattcagaataagctctttatcatgaagaatagcaagcttgccagcacctaaacctgttcctgtgtatcctcctgtttcaaatgaagatatttttttgcctgttgtattgcctttggtcacagtattaagggcattagaagcttctttaagcttatcgataaggttattagagatacttttaccaatggactccatattgctgttaatgaatttagagaattcattcagttgcttagcaatatcagtaatcttcccatccattagctttttctcaagttccttaaatccacgctcatcattgacgagatcatcatatttcttgttaattgaatcttcgtctttttgaagctgatcttgcaacgcttctttacgtttgctactttcacgatctttaagaaactcatctaaatctaactgttccttttgtaactgctcagttaattccttaacctttgacttaccaaattctgagtcatcaagagaatactgattaatttggtcagtgagtttttggatactctcttgcttctcttttaactgtctttgaaatttagcttcatcgtcagttttatcgatctcatcaatcaagtcttgtgttgctttttggtgcgcttttaattcaatatcacgcatcttttcgtacatctctttatagatggagacaacttcatcagcaagggatttgtacacatctttgattgatttctttgtgttgtaaagctccagattgtaatccttctgcttgtctttccagttctcgatttcttcagtaatttgtttctgaatatccgggaaccctttagcagctttcttttgtgcttccaactgttttatatacttcttcgcttcattctgttgctgctgaataagcttaatctgttggctataatatttaaccttgtctttatcttcctcggtcatggatattttgttgctaacatctttaagcttggattcagttttcttggttgatttctctataccgttaagcgtttcatcaactttggattggatgagctgtccctgaagttctcttacttcttcttggaaattgatgagatcaatcttagcttgttttaattcctcagcaagctgtgctctttgagcggcattcagagttttgtttgttttgatttctttttcaataaaagaaaccttctgactctgaatcttttgctgttcagttaaagcttttttctgatcgtttgtatacttacggaactctttactatcgctcagataatgactagcgagggctttgtctttagcgattcttacatcaaaatcaccaatgcgcttgtcatattcatcaagatgcgactgaacgatctcatattgaagctcttgtatctgatcgtttactgaattaatgtcaccttgaagggagaggaggtcggatttagcttgcgctattgcttgttgtcgttctgcttcagcttgagacgcatctgaaatagatgtaccgacaccttttaaatacttctcagggtcaattgtctttccgttttcctcaatttgaagatgaaggtgatttccagttgaattacccgtactgccaactttaccgatggtctggccagctttaacagtttgaccggctttaacagaaggggtatcaagcatatgcatatacttagcaacttttccatcatcctgctgaatgacaacccagttaccggcagttttactataaccagcaatttggactttaccactttgcaaagacttaattgcagtaccggcttttgcggcaaagtctgtccctttatgtggagttgatcggtaagcgccatcttgagcaccatacttagaacttattctaaacgcgctgttcttcgtgtagtagcttgcaatggaggaattggcagaagtcattgacttcgtgtaatttgacatgatcttctgaacataattctgtgtttctttgaagggagggacgccgccatatttaattacattaccaggccctgcgttataagcagcaagtgctttctcaacattgccaccaaatttgcttagttgttgggctagatatttcgtgccacccataatgctctgataaggatcataaacattgtttacgcctaagcttttagcagtggaaggcatcaactgcatcaaaccagcagctccggctccagagcgagctcttgcattgaatcctgattcttgttggattacagctgcaattagagctggatcaacaccgtatttgcttgcggcagaattaatgtagctggagtatttaccggagtaagacccaccaccagaagaaaaagaaccaccagaagatgaaccagaggaaagggaagaggtaactataccgtattgtgcaatgttccctgacttaatttgatccttgaggagtttggcttgctcctgcataagctttttcttttgttgaagagctttaatttctttctgcagggcatttcgataactttgggaatactttggatagtcgtttacttgcttattgtacttttcgatttcagcattaactttctccagagcttccttgtatttatcagccacgtacatggacgttttggtttcttcatttgctttctcttgctcgtctgtccatttttcaagggaagtacctgattctattaacgcttgtttgtttgtttcctgagtagatgtagcttcttcagatgctgagatgtaggatttaagagcagctctaacgctatccattgcagagatttggctgttagaaaatccaccaggttgcaacattttttcttcaatcttatgtaattctttcttcgcatcagctacattattgattgatttaacttcgagctgagacaattctgcctcggatatatcgagcttacgctctctccgaagctttctaaggctgtcaattcgtaaagaatcagcgtttaaggttttaatggcattattgacttcagttttcattagcttattgctatattgaaccatgtcattataggcatcgagcttaacttttcgctgacgaattacttcatctcggttaacctttataacaccattttcataacttattgctttggctaattctttatctttttggattagagcattagcttcattggcagaaatgctctttccttcagccatcttttctaaaagttcgtttaaaggagcaacttgttctttggtgttattaaaaatatccccgttaagaatgccttgaacagagtcaaactgcattgactctgacatgcctttgattacatctttaatctgactgatatcatttgcgtcaagcgcttctttgagcttttgaccaaaatcttcagcttcattacctgcttcagcaagagtttcccctaaatcaccaacttccgatttaacagaagaaatggccttatctccatctttaatgttcttttgtgccttatcaaaactcaacttaaagacatcaatagaagaactggattttgaataggtctccaaaagggtttgcagatcctttttcgcgctatcaaatgctttttcatcgtttgaattcaatgccgattgcattttctcttggagtttacccaatgcagaagagaatttatcgagatcatcaggattcaaatcatcttttaaagtgagtttacctacaatgtcattgatactcgtttttaaagtattgctgatatctatagaactgtatgcttgggcgattgagagaacactgtctctaacctttgcatttccacttgctatgtcagattgtgctttaagcataccttgcttcgctttatctgcagcgattttataatcttcatcatcagcaaggaagtcccattttggtctgcctttatcattataatcagcaatttgtttgtattgcttcaactcatctttagactttttaatttctttagaagcgtcctcgaaagttttcttggcgctgtctttagtttccgtctttttaagttcaaggtattctttagtgttctcaatagcttcttctaaagctttattactttttaaaattgcatttccttgagagtcataaccttgaattaaagcggggaatgtctgagccaattgctgagtaacttgaagatattcttgctcttcatctgatgaaagggttcttgaatctttggctttttgaagctctttatactgttttattagtttgtctgtggagtctttgttggttgtaattgcttcaacattggtctgttgactctgttcaaaatcatctttagctttttttgcatctgcgaaagatgaaactatgctttctaaagcccaacccaacgcagcaagcgcgcctccaaccactgtagaaactaaaagccctctaagagcagttttcaaaacccttgatgcaacagcagcacgggtcatacctgcttctaatccgatgctagctaaggtttcttgtctcattgcttttgagcctaatataagagttgtagctaaagttcgagtgtttttactgagtaacaatgtagcagtgctaatcgtcacaaaaagaggggggaggaaaccaacagtgttaattattccagtggaggcttttaacaaagaacccagagcttgagtgaactcaatcaatccgtcactaataaaggcatccgatgaagctatagccaattcagtgaaattgttttgaagtttatttaaccttgcttgtaagctatctgcgtatttctgctgttcgctccaagcgctacctgcagaattagaagctgttgcggcggcattttgggcgatagagaagttgttcattaaggcattaaatcgagacaattgatggatatttgcaacgccaatagaggtgttttgtctttgagcatcagttaatgtgttccatttggctgctacctcattaatcaactcactcgcagattttgcttctccgcctgcagtctttacagaaattccgatttcatccaacgctttgattgcgcttcggttgttacctatccgggcaaaaatagttttaagtgagttaccaacaacgtttcctgattcacgagtggtacttgcgattgctgtagtataaccaatcagatcgtttaattcaacaccgaaagtcgaagcggtgcttcctgcttttcgaatagagttggccagatcaagagtagttacagcgtagttgttatccacttcatttagcttgtctgcaattgaaatagaatcattggctgcaatattgaagtttaacattgcggcagttaaagtattaactgtgtcatcaggagttaagtcagagacgttttgtagaacctgcgcggtttttgttagagttgacaattcactttcatcgaagcccatacgcccgaaatcaccggtcatttggagaatgtcagtgattttgtttgaaagtgtgtcacctaaatcgattgactcttgaagaagttcattgtacttgtaatcaggctcattcatcacacgtctgatgtttgtcattagagtatcaatttcaacagcctgagataccatttccttgagtccagatatagcgccgtagaacaaagaaccagagattaaatatgtagacatacttttgaaagcttgcgttagctccgcaccaaaagacgaggcttgactagctgctgcttgcgcatttgaagccaattccctgtattgcatgttcaagctttgcatttgagctctgatattgcttccgccggcacttacattaaggctattaactgcattgaggtactcttggatagcttgtctatttccagcgcccatcgtatcgccataacgcgtattaaggttttgtacgtttacctgtgcttggcgttgataaagctcaatagtttttcggagttcattatttttagccacagcagcagacttatcatcgagcattttaattctgttttgtaatgcttcaatttgttgagctgtttgagcagtgtttaatttccgcccaagggaagagagggtggtgtcagttacaattccttgctgtctaagtttttctaaatctatctttagttgttcaattgcttttcgttgctgatcgtaatttgttgtaacttttgatgacgtagcatttgtctttggatcagtcgtatatgttatatcatcgaagccattgcggttcttttgagttaccctcgtcgtttgtccttgagaattcttctgttctgttcttttctgtacctgacctagtttttcagtcgcttgagcaagcctgttaacttcttgggtttgttcacgtagtgattgattacgattgtcgatgaatttcttttcacgctgaatgatttcgccatttttcttatattgctgcgtcagcttttcaacagtgccatcggcatttctggtaaccgttgtggtttctttaattgtttgattgaaggatttgagatgtttttggtaagtgtcaactgcagaggagaattcgttgagagtctttaaagcagaggcatcaatattggtctttaaattaagggaattaagctttttctctaaagatttaatttgctgatttaactgttcgacagtctttgaggaggtatcagcttttggggtcagtattatttttaaatcttgactcaaaaataagtcacatcctttcaagtggggctaatcagagcaaataaaaaagccactcaaattattgagcgactgtacttgttttcttgataattacatccatgacaccttgccaatactcagcgttttttaaagcttgctgtatgatattcccatcttttttataaccttgaggctcatatccatcatcctcgcgagaagggaggaagtggatatagtgtataggatttttgaggttttcgactgtaattttaagcgtaattgacttcaccatttctgtttgagtagaggaggctgacaaaccaccaattgttgcaccaattccgccgcctaataatcctccagcaataatccccgatttggcaaccttcgaaatcacctggtcatccagtgagatttcagattgaataatttgggcaaaagggacaacatactcgtttatttcttctccatttagctgatataccttaaggatagatttatcttcattgtaagcaattttagttttataagtgctaaagaaattatcagggttaaattcgctatcataggtctttagtgtttcagcattttttctaatcttttcagcaacagttgcattttttattctgtaaggttcgagcgctaaataagccaaaccgccaattatcagaaaaacccccaaaggtctccagccatccattaaacagaagaaaaggctgaataaaaaatagccaccataagccataatcttatagcccatccaaccaccaccagtattattttcctacattatatcatgatttccaaaagtgtagaactagcaaaggggagggtcactttcctttttcggacttaatctgctcaagtaattctttaaaatatgtagcagtaataacaatgtccctatcctttcgtacaacaaaaagtaggagaaggcaaatcgatgttgcgattagaatataccaaagcaaattaaaactaaacataattctgagagatagtaaacatgttcctatgagcacacttccaactgtccacattttcgtatgatcgaaggacgcttcaattcgactcatacgggaaatagctaaaattaaatctgatgaattgagcgattttaggatttgaaatttgcgcttttgttctgtgtagagctcaccagagtgcgggaattctttttgtatgtatttgatcaggtcgcgactattcatctgtactaaattgtgtttaagtattgtcttattcatatttttcacctctccatattatcgtcaaatatggaaataagtttaaggttttatccataagcaaaacccttcggtagaaggatcttgattctgcataaaagagggatttcatttacacttcaaattttgctttcttgtcttgaatagcatctttgtttacttctagatagtgattctttgttacgtcagtgcctttatggttcaataattgagacacgtcctctagactcatgccactgtgatacagaaggttactaccactgtgccttaaatcatgacagtgtaattcaggaatatcaattatttctccgattctctttatccaatatccttgtaaagttccggtttcagctttcttccatatgcctccgtactttgttatgaaaaggtattcgcattcaattccgttttcggatctgtactccagccattccttaacaagatcaatagctctttgagaagggaagagggtgactttatatccttctttttcaatgacatcttccacccgaagtctttcaaagtcaatttgttcaaccttaacgttgcttatggcattagctctggccatcgttgagagaccgaattcaaagaagagctctaactgaatattttccttctttttaagtccttttctgatttcttcgacttgttcttttgttaggaaggtctgtttaatttgaagtttttcaccagttccagctttaggcctgtctaagaagtcaacgggattctctttaatcttacgttttttccttaaaaataaaaagaatgagctaatactactcattcgtctctgaattcttcgttcattattgcctagaatactggtgcaaaatgcaacaaagtcttcaattaaatcaaccatatcatcaggatcttctttaataatatccacaatgtgctgattattgtaattctctaaaatgtataccagccattgattgaaatctgattgatatcccactttactggattccgaaaggttcatgtttttaaagacaaaatactttcggattaattccgcatttttggggttaattttgttgaccttttcttttgttgcatatgctatcttttttctggccattaatacaccaccgttattctgttttaataccacttgtatttaaatcttttatcatagcagcaactaatcgtccatcttttaaggattcagcagtattcttcatgactgggcgaggttttccgtaaccatagccgtatttatctggatacgtgtacccttgaccagtctcaacaaccgtagcaacatccttgccgttgtcttcacggttgttgtctaatgaaattccgttatattcgttttgaatgacaaaggagtccttcaaaagagaagtacgttcatatacaagaggatcgtatgtgtcatatacatcagattgtacatgctcttgacccgttttaatcatcgtattttttgtgctggattgtttttgaacggcttgctttgcggcaaattcaattaatgctgctatttcttttatgttcttggccattattcagcctcttgttcattctcaatctcttcgaccttattaaggatgagatcatttatttcttcaggagatatgtttgaaagtttgtctaaattctcttgcatcatctttgttgcttctccaaatttcttcatgctttcttcagggaagctactaataatcaatgggaaaaattcagagtccacaagcttaacaaaccacttaactttgtttttgatatcacttggaatacccaagtctgtaaattctttaattagtgaaaagaatccccattgaacaggatttatgcttttaaagtcaatgtttttttcttgagcattttgtgggtcagtaattaattcagtaagcattttggttaagcgggtaggggagaagtaagggtaaataaaaacatgaacgtcctcagtaagttgtactcgttctttcttgtcatatttacttacactttcttcaatcaacccaagatttaattttttcgatgccatctcatttcctccttatatatcctctgcacacattaaaaaagacacctcaataggggagaggtgtctaaataaaacttgtattttattctgtgtctgcttcttcgtagtcttcgccggtgatttctttgtactcttctaaagtgactaaaccattctttactcctaattggagctcttcttttgtcacatcgttgaattcctggtaagcttctttgacttgatcgacggttgcccattttcgactcagggcattaacccaataattgtatgtagttattttatgaacctccctttagatcagcaatatcttttaacattgtgtttattgttttgttgacttgaagcaagcttaggcggagttgggatagggtctgtcctattatttcaaaatcgttaggttcagggatacttggtttaacgctatccttgtattcttcagttgctgattcaatccatttatttttcttgggatcatatttgggcaagattattgtggggtctgggacagcagttgtactatttggaggaagagcatcgccttcaatgaagtcttctccagcgtacataaagttctcatcataataaagaacatgcataatattttcacctactaccataaaggaattcctatattaaatgaaactctggaaacactgttaatgtcattagcatacaatccatcaaaacgtaaatctccatctgttgtgaaggcaaatctcgctgttccatatgatccaattgtgggtactacaaaatccactagctgtgttggcttggttgagaatttagcaactgcagttccaatggccggcaatgttccgaaagatcctcttagccataacacattgtttacacttgagaatttgaaagggtaagtggagtattgtgtagctccattgataagtgtaactgggttccaagaacctgacgtgccactccatctggctttgtcatctaaagtaacgtgaatatcagtttttgcttcgtgggcatcggtgtaagctttcgccgagctgagtgcggtagtagctcttgcttgtgctccgtcagtcgtctcatgtgtttgccaggaagtccatgttgaatcgctctttctaaaacggaaataagtatgtgttccgtaatatgcttctaatgcgaattgtgcaatcgtagttccatagttcatgacagctaaatagacattggataagttggcaggggagtgaagcccctgatttgcgattaaataaaacccagtgttaatcaaatcattgtactccgttttttcggagctacctttgtagaatactttcccatcatcgtcagtgagtttgaaaagttgagcagcgtcccatttttctcgatcagacttgctgatatgaacattagtgtcattcagatgattatcaaagtcacttttagtagcttgttttacattgtctacattcccaagcccaacctgttcagcagtaaccttgtgtgggtttgattgatcgttagtatgttcagctaaaaaagactttgacctttcatcggagctgttccaataactgcgctcgtcctttgtgatatgtcgatccaggtctgcatcatgagcgtcaaaatcaattttcgctgcttgctgtacattatcaaccttagataagccaacttggcttttagtaactgaatggggatttttcttgtcgtcaagatgtccatcaaaagccacctttgtggcttgctcttcattaagtacatttggtaatccgacttgctctttagttacatggtgcgggttttctatgttctgagtatgcgactttaattctgaattttgcttttccatgaactcatcgaccttatcggataaacgtttttcatgatcagacatgtgagattcagttctgaaaaattgatctttaaggttattgatttgtatattgttttgtttgagctgacctacaaatttactgctgctcattaactcaccgcaattcctttaaccgtaacatctccatttacggaaatgacctcaaccatgaatttgaaaagccccgcaatatcgaaatcccagttttcatttgtattcaatgtacccgtacctaattgaaaatcagttttgtttgttccagcaatttctgtcttttcgccattttcatctacagcaaagaattttatttctcttgaagttgaggaaccagagatcttaacagtaatatcccgataatgtgatactacaaattcttcaccttcagacggggcagttgttgcttcgtggaatgtaaaggttgctttatctggaatggtttttaaaatattttcatcggtttctgtcaacaactccacctcctaaatctgtttaaaaactgacttttatttaaaaaggagaggggaagaatcccctcaaattatttagcttcaaatactcttacgtctctgtcagtaccgtcattgatcacatagacataaagtgttttaccagcggcgacaggaactgaaaaaggtttgtcaccggctgttaatgggatacctgtatcagcagttacagttgagttcccaatgtaaatcgtgccttctgcaggtgggtaaatagtaagtgctgttctgtcagtgatacctgcggtaactttttgagctgttgaagtaacagtgaatttatccgttttaaaagaggagaaaccaggatctctttcattcaaggtcacggaaggggattgtacttggatgcctttgatagcatccaaaccagcttgaggaaagtcaacttgtagtggtttttcttgtgattttagatgaatatcggtgattggtttaccagttccatcgtctctagctgaagtgtaaatgtctccgtctttgtttaaaagtgccaagatatcaagctcctaacgttattttgtttcttgcgttgttccaatgtctacactgctattcgatgtcgcatcttcttgttcagttttaattccttttgtcccatcagggttacgcttaacacgggcaaaagtaccgatcttgccattatcatcagctaatgctcggtatccaatttcaggtgtgtaggcttgtccagcctctaaggacatgtctgcttcaccagagaaattaactttaggtaactggatataaaggtcactgtaaatttttgatgtctttggatcgtactcaagtgtgtggatttcgaagtaatagttctcggagaatttttcaccactaatttcaactgtttctgcatcaacttcaatttgatagtgagctgttacagcgttccctttagcagcaaacgtttcaggaacagtaattgttttgtctgaaacattaaattcttgttgatctccgtcttcatttgtaagtgagactttggataaaggagtatacgcgattttgattgtgccggtatcacttacagtaagactttcatcttcccatacagaaatcgtctcgttttcaatttttacaccttgctgcattgccataaaatcaagatcaaagaaagcattttttacgttgcctgaaacctctttgcttgagttgatgacatacaggtctctatttccccatccgccttttaaaaagtcttgttggacttgttgggagaactgagtcatttgtgttacagaagatgcaacaaccttgtggtcactaagtcttttggttagcaccttgccaacttcatggataactgtttgttttgccaagtgttttcctcctaatttaaaatgaaaaagagactgtgaatcagtctccgaataattgctctaaatttttagcatctgctgtactgaggtggtgtttttcttctctatacatatcaacatgactattccagtcaccgattttcacatcagttgatacagtggcaaataacgcagaagtgttataattcattatttcacccattctgtaatatgacaggtacaattgataaattgtcatatcggctacctcttgatatgtgtatccattaaatgcagccacacagctagcgatgtcctttaaatcattttgagaattttggagttttaattgattattcaaatcatgaaactcctgtaattcatcattctcaacaattttctcttcagtcaggcaatgcatctctaatatcaattttctaacattgttaaatgctctctgatcaataagatgtagtgattccttgtccacaaatactttgctaaacactttaaaataagcctggttaaattcgggtaagtaatcatgaacaattttgaagagactattcttcttcaattcgataattaaatcatttaatgaaccgtcattgttgatttttgaaaagtttctgatgatttccttcttgctcattttcatcatatttagctcgcttatgtactctgggtaatctcttaagtggataaagtttattgcaccgacttcagtattaataggccttcctaaaaagaaaaaatcctttaacacattcatttacttgctccgaaagtgaatatcaatttgtatcccaagtacccttcaggcgcatttgatatgagcaaccttgtatatttaacatttttaccgatgccagcaaaattttgattgaagagcatgtcacaaatacgatcagtaattttcaggttcctgaattcggtctcctcataagtgttaatgtgtgtataaacatcaatcatcaagtcttgatctagcagcatcacactttgggttgagggtttagggattccattgccgagataaacacaaagtctgcatattggttgatcggttaaatcatcagttttgggagcacgtttaattattgagcttaatattgatggggaatcatcaactggatcataataattttccaacgtctgaacatcagggagagaagaggagagagggtcatctttataatataaaagacgattcaattctgtatcattcataatagttctaaatacagttgtcatatgttcaaccatcatactcaatcgctatcacctccaactttctttttggctataagtctaattgttccggtgtctccatagaccttggaatagtctatatcatcaacacggaattcctcaccataaaaagaaagaaaaagacccttctttaatttttcatgttttaaaaaagggatggtgacatgtgcttgcccttcaggaatgtttatagccaattctgatccaattgttgaggttgttcgttctaatacacacgggatgtcaaccttctcaccaggcactttaatctttatcggtctccctgtaacttcatcaatctttccagaatcaataagtttgtcagaagatgttagactgattgatgaattgcaaagccgcatagtagcactgtcattcattttgttatcagtggggcgcgcattaactaaccagtaactaccgtcatacaaaatcaagtctccacgatttaataagcctaaaactgtaaggactttttttgtttcgctgtcctgagtggtttgaattatcacctgttctggcttaccattcaattcaatgtcgtaagtttcaggtgaatttgctaagatttctttgaaaatttcatacttgtttgaattaaactcttcgttttcccagccactcaaataatttgaagaagaggttagataccaatctatagacatctaatcacctcaatcaaagttattcactttcagtttgctcatttttttttcaatctcatcgacaagatcttcataggatctattaacctgagctttagtattagataaacctgtcaattgaacatctcttcctacaacgttgtttaattttaaggctctgtctcgatatctgaaagagaatcctttgtacataagcattcctaaaacttgaatttgtgatgaagtaaggggatatttaaatgtattggacttttcatcataaccaagttctgtcagttcggtttcgtattcaccaactgcgttaatgaaaaactgctgttcaaggccatcagggagaatttcatttgattgaaacattgagtggaaaacgttaattattttttcataaggagtcaagatttaacctcccttatgattgagtatcaaatttaaacccagtgtattcttcaatgaacttgatcttagcgtaatcattaatcttttcttttttagctacatcaaacagctgagctttttcagactcaagtaagatttccttttgaacattttcttcgaaggctttttgggttttgtatcccaagatttgtttaattcgttctacagtaacaatttcttgtttgtcgtctttatcttcggtctcaaaacctaagtgcacacgggtttctttgtcatcaatatagattttggcatgagtaccttgaccgtcagttccagtaaatagtgaggtattgtcatagacttgggattgcacttccccagctgtgatctgtctaattccattggccggcaatctgaagtcaccgtgagagtcaatctttcggaaatataaatcccatggacataaatttttaattgtaatctttttatctaaattaaaagacatgtaatccctccaaaaataaaaggagggacacagccctcctaaattttaaattgtttaaatttgtggtaattcatattttgtgtctctgatgagaccaatttgatgttcttgtcctttggctacaccagctccaatttccatatcaaaacgagtgatctcagttccagtgataatgtcgttaccattcatcgatgtgagtccgcctttttggaaaacttgaagaggagactttttaccttgaggaatgaagaagagaagtccttcaggaagatatgttttgaagttatcgccggctttatttaattcagttagattataagcattaggtaattctacaacagaagaacctttataagtgttaagtaatcctgttcttcggatttcatccataacagactgagggagtttagtgcttgaagcatctccggttacagcctggaaccctgcaaagtcatttaactgagaaacaacagaaaagtcaccaacaatagaaggttgtccaaatcggcgaatctttgtgataatatcgtctacagatgatttggtgataccttcagtttcagcaaagtatttaacacctgttgcatttttaattgcattgaacatttcatttactacatagtacatcgctttgttcatcatatctgtttgaacttgctccatgccttctgctactttatcgaggtttccactttgaatctcacgatagttaacagcatagccagaagaaatggtttgagttccaatcgggtattcgctccaagttgtagtagcgaacggtacgtcaccacgggaagcttggaattggcttcggatggattcatgcgcgtatgatgtcatcattggttgctgatcatagccgatagttctaaatgtgcccataaaatcaaatagcttaattgctgaaataagcttaggctcaatggcataacgcacaattgtgttgatctcggctttagctacagggttgcccataagagctttggaagctagttccttcacatgggtcatagcagcattggcttttgctccaaacttggaaagatcttgacctgttgcagctgcagaaaagatttctacaataggggacttagcattcaatttagcatttgcataatggtttgagtctttttgaacattgtttaattcaactgtaaacattaataattacctccagaatataattaagcctgtactgttaggtacaaaccttttccgccaaatgtatttttctctaagacttttagagatactttaaactctgcaacgtcatctccagctttaacccatttacctgatttgtctgcagcaggaaccaatacgtcatctttaacaagcgcatcataatcaactactacgtctgagctaagttcaattggcagtccttttaagtcagctaaattaaaagcaaggacatattcaccttttagaactttgaagtcttctttattgcgaatttcaggtttatcaataatgtttccaacaacatacacatcaccttttgcagttgaagatgcacctggagggaatgcgttaccagaagaatcgttagggattacgactagaccagggactaaatcgacactagccttgcaacgtggattatttcgtacttgtttataagcaccaattgttccgaatttgaacattgagtattcctcctaaattttataaaagtgttattttatcttaataaagatcatcaatagtcactgaactttgttgcccagaatcacgaacttctgaataaatatcgaaatttgtgctattagtctcagaggcttgcttctttgagcgttcagtgatgaaggatcgagcgattgctgagttgatttcagaaataatttcgtttttaagctcgacagaaggagacttagagaacatttcaattttctcttttgcgacatccttttcttcaggagaatattcctttaaagcttggttaagctctccttgcatcttttcggctaccgccttgtttttgaattcctttagggaattaagctcttcatctgccttggctttttcatccttagctttttgcgcttctttttcttttgcatcagccttagctttttcatcctttgcagctttaacagcggcattcagttcttcagttttttgctttaagtcctcagtaagtttctcaactttttgatttaattctccaatttctttattcttattatcaagtttgttgtttaactcaaggactacttcttcttgagattttggcattaaattatcctccttttttttactgtttaattcaagcaaaatggcagcgtcgtctgcagggtcaatacctaaaatggcatcacctgtaaagtcaaatttcataggtatacgtccttgctctttccagccaccttcatattcaattgcatctgaatcttctacagctgctatctcaaccgaggtctcagggaaatcgccatcaaacatttttgattttaaccattgaacaaatttaggatagcgctggttgtataggaagccttcagctattaacactctttttggctcaccattaacatcaatagtgtcaatgtaagcattggtagtcgtaccaaccactgcgctgttttcaaagagaggggtgccgtccttgacttctgttaaaccgtgtccgaatggctcactgttttcatcatccaagaattctgcgcaaattggcattaacttgattgattcaaggttagcgtttatgtatttctccagccaggtaataccgttcttgttgaactgagtattgttttcatggatttcgagaacgacccacttgatgtatgtttgaccactggtttttttctgattgttaatttctaaaatcgtgcttttcaaatactaatcacctcctctcaagagccagaaggcgttccgttactgttatttgtcttcgatttaatcgtgttttcatttttcggatcatcgatctcaggtgcgccggctgacttatcgttattcttactcattgtgaaagaggtcgcatgaacagggaacttttcatcaaaaccttcgtctttttcatattccattagggataagtaagcatcaggattccatccagtagcggctatccaagcaataaggcttcctcgaccacttgtataaaggtctttcatgttttggactttttctttcctgttaacgtgggtaagagggaggtagtaaacctcaatataagagcgaggatctttgatgatattggcgtttatcaccttgttaaactcactttgaatttgttctaaccaggagaatatttgggaagaaaccatctcgatattggtttgttgagaagaatagttaccgtcttgaccattgagagcagatcctgcaaatcctaaatttgtagtgattcgtttaatgagctcgtcttcacctttaaccttcaagaaatctacattagtttccaacttgtctaattttgttccagaggccaaagagaagaacttaacacctttaacgcttcctttagcaactaacgctttttttatattctcatgctgctgctcctgttgcttttgagataaggctgatttgcctttttgatcaccttcagggaaagtctgataaattaaagtgctgttgagctcatctaaaatgtttcgtttagtgtcaacaaagtattcatcataaaccatatcaataaatgcggataaaccgattgggcgtccccattgatcttcaatgtcgctacttcctttaacagcaatagtcttattgttatcaagaactaaccattttcgattttggtctttcttataacccctatagccttgtctgatttcttctggccatcgtctaagcttgagcgatctcccgttacttgtgaacttatcaaaataggagacatcaaaagctaactgataagaggaatttttccttccgataattttgcaataatcgagaggaagagggaggacggaacaattaaagtcgtcaatagcatttgattcagttattgatccgatctcattgtcacttagagtggtggggaaagaatcatccactacagaatcaaaataataaaagccagtgccatatttgctgagttttcctaatgcatccctgacagcacttttgtcgccgatttttcttaaagccagattgaacttttgtttgttcgatttgaaattagctactttacttgatcccaaaataactctgtctaaagtagggagggctaccatgtagtcaataacgtttctatacacaccatttgcgttataaagcaatttagaggcatccctaatctgtttattgtagacgttgtggtctttcagccatgatttaactttgtcgtaagaaataccgttaaataaatcattaaagaacaatgaatcaagcggcgctaaatttgtattaaactcatatgatgactgtggttcagatgtagtcattattcacctcctcaatttctaattaaaaaagaatccaaatgaatactcatcatcggattcttccttttctaaaaataaagctatgtaatacagcgcataagcaattgcactgtacctatccttatcaattctttttacaacttgctcaacagtgaaagaattctgtgtctttttaattctgaggtttgctacttcgtcaataaacaattgagtttgaatacatgctgcttcaatcattacatcatcagatatgcttttttggttcttgatgtcatcataggatttaagcaacttcaattttccggactcaacataatccaggaattgagtaataatgtcttggttaataccttgggattttaggttgtaaacgatttccggcgaatttgggacatctggcttttgatcagtgtttattgtggcccagcatccaagttcttcattggtctccggatccgtaacatcctctaataaccggtcgattaaaccgccaccgactccgtttccatcgacaataacagctttaactcttgagagagaagtatcttgatttcctccatagtttttgaaaactctttttaccatgattgattgttctttaaaactcaatccgtttggtggctctataatattgaccacttgaacttgcctaatgaggttattgctgtttctgattatcttcaaaacaacgatagctgttttattgtttgattcagccgcagagcgggctacgtctaccccgattacatattcatgtagcaagaagttcttatttttatctctaggacaagaaagttcagggtgggtaattgtccgagctttgatcaatttactgatattaatcaatgcgccgtcacttgcaccaatccagtcacaaaggtaattctgacggaagcgagttacattcccttgtcgcgctttattaataacagacattttttgacgaccaaagtgaataggaatgcgccaatctgatccgaatacaaaggatcctttaagatcaccagtttccttaaccatcgtaaggattttttcgtactcatctgagtttttatatcctgatgtggagaaccggttaatctgcccatttaattcagcaggatctatttcgccagtcatggttgtacgagggatgttaaaaatcggctcgatagcatcatcgtataaatctttatcaatcaaggcagattcctctaaggagccacgtcttctacgtaaacccttagatgattgggcgtttgccaggttatcgatgatcgccccgttttgaaattcaactcgaccactgtcttttgaaaagttttcactcttgatttcatctttaatggaagggtaaaaccttaaaatttcctcgtgcttttctttccaaattttcaccgctgattcctttgtagaagcggtaatggctaacgttacattaggaaagcaaatagctgtatggtatgcaaccatgatctgggtcaatgtattatgactaactaatccattacttacaaatgagttggttaaaggcatatatagatcataaacgtagttctcagagtcttctgtttcaattactttagtgtaatagtaattagaatcataaagctctactaaatggttgaattcatcgctatctttattatcaaaacgctcattttcacttaataatagtgataatttttcgtaagtaagatcattagatcctttaagaacatgataaaatttatctcttgttttacctttaggataaattgctataatgttatcttgctgataagggatgacatctttatttggattgcgatttttgttacatattgatataagtttttcttgctttcttgaacaactaaatccaatttcccgtaaaaaaagatcaatattctttgtagaaatattgatcttataatgataagtattaaattttttatttagatatttttttctgaaagaaataataccaaagtttaaaagtaacatttgaacttgtttactcattttttctgatgcagtgcaaaattgtacgcttttatttgtcacacatccatcggtatcaaatagaccttgtattgtttttgcaacaatatttttaggtgctttaagtataattttaggtatttccttaccaaaagcatctttttcttccagtcctaactgtctgaagaattctcgaatgagcttaccaaatacgataaaattaattctatctttttgcttaactgcaatacctaatacgttgttaaaataatctatataattatttaatatatcttcgtcttcatttgtaaaaagtattgaattgtttctagtcaagcaaccatcaccaagaagataaccaataattaatgctaattgttcatcaatgtattctggaatattgaatttgtttctttctacttgccatctgccttgattgctaaatccatttaagaaatcatcaaagcttacatttagctttgtttcacttccaaatacattattgtttcttgaaataggtaataaatctccaactttaatttcactagaatttttgtatcttagttttccatcttcacacattactaatactgggtgatttaaacttgcttccaagtcatagccatcttgagttttgattttcttcgttttcttgaatccgcttgatatgccggccatagaagtttccattagaccatatctgtttttcattgagattttatgtattgtttcaacttcagactcttttttttcgtaattgaatagttcgccaatttctactaatccattttcagtaaataaaactgtgtctcctgcaacacattttgatccgccacgtggaatacagaagtagttctgagggaagcgactgagtgttctcatcataactctttggtataaatccagctcaattccgccgacttcgggtttcaacatatcgtaaaaaatgtctggataaaaacgaataaatgaggtgaactcagcccatttggagatattcttgccaatgaagtttgaattgtcatctggattcagaggggtttcaaaagctgcgtcgtaaatatctgttctgttttttgtgtgcttcttgtttttcgaggtgaagtttttataactagccattaatcttcatcacctgtgtcataaagaggttctttgtacacattctccaagtctctgaaaacattgttgcgagcactctttagtttatcaatttcttcaggcgacaatccttttgatttgaagtcttcttcaagcatttcatcataaaaatggtaaatgtctttgtaatcgactttttccttatcttcgagccttctgtaataatttataatcgcccaaatgattagatcagcgtcatcatatggttgggctgctaaacgaggaagaagggggataatgcccaattctgtttcaacggcttcaaataattgagaaagtacatcgactccaccactgatatcgctcttacttaactgagatacattaatttttgcatctgtagctgcctttgaagctaatgaaccccattctttagcttcttttacatcacctttagcagttgctaattcctcttttacacggaaacgaatatatgaaagcaagccttcagtatgaagtgtggttttttctccgtaatttcgaataagtttattgtattttctttcaaactgacggtactcatcgggggtgtaaccaataccccatttatcaatcaggtcatctggaatttcagattggctaacaccagaattgtttgtaggcgtagattcctctataagtggcttctctggttgtctttcaaaaacactgtctttataaccagtaccgttaaactgcttcaatgaattagccattgtcatataagcactaaatgtatctgtttttctcttttcagcttgttcccaatacaacggatcaaatttaacatcgatctgctgtaagactgtatatattgactcaatattgctgtaatcaatgtttttcttcaagcaagtcttgcaaatagggacttttcctgttttctcatacagactacttcgtgaattatagaaccccgactctttgtccttttctttttgacaagcagcacagatcaatttttccttttctttagcttttcttggcattggttcacctccaaaattttggttcaaaaacacgttttataaaacgcccagcaatagagagggagtcgagatttctcaaatcatcactggacgttctaaaaaagtattttatttataagttaaggcaccgttttcggacaaaacaaccttggttccttttaaggtatcagcaagagcatccagcaaaccttttccaataccgtttgcatcaattattaacttactcggtcgtttgtctataataatggcttttatttgactagcctgatgtttaaacgttccatgctccactttcttagagatgtcctcaatacgggaattatttaaatcaataattaaaaaggttgtttcttctcttctaggattaattacagcaattctttcaggattgtagcccgtgctcaatgtgtagctagttccgtttaagggtttagtagagaatttgacgtctcggttcaattgttcacttttagtgtttttctcaaatcccaggcttttatgcagacttgtcagggcgtcttttaattccctgttacacagataaccactatcattaatttcttttagcagctttacatattcccaaagaattttagtttcttctttcaatcttcctcatcctcatctttataaaattaaagttttatattaattaacaatcaaatttactagagtgctcttactttcaggggacaggttgtcccactgcactgctaatatttctataaaatcgtttgcagacataggatcattccttttacttttcatttttaaagcgaattatgtatgtagcctcaatacctgcatcatcaaaaaccataaatttttgagaaggttttgtgccaaaccgaccttgcatagcataatcatccgcaccaacaagcgctccgtttactacaacggttgtgctgccgtactctttttcataattgtgatgaatatgaccaccgaatatgtaagaagggatgtagccaagtaattgaggtaatcgtgttacacactgatcaacacgatcgtagtgtccgtgcacaaacacgacttcctgattgttgattttagcggggatgaatccgtcttgctcaggttcaatggagatgttctctatgttctttaatctggcttcaagataccaattaatgaggtattcaaagttttctttaatccctacatcatttttagaaggggagaggcgaccgtgattacctgccacgttgtagaacttaacctcttgaaactcacttgccaacatcgctaaaacctcggcaagcgtttctgatacatatttaatttgttctacagcatcttcattggcctgaactcttgtagacacatgaataagacctccgattaaatcaccgagatttgctacatgcagtgtggaaacatgattctgcttaccatactcaatcactttgttggtgagatgttctacacgttcattaaagatttctttattgaatttatttatgcggttgtcgatttccattccgaagtgccaatcactgaatagagcgagtccatgtttttcagcaatagcaggtgatgggaaggtgaagcgaaggggtctttttgactctaaagatgcaatagcttgtacgacatcatctttaatttgttcaaaccgtgcttgattggcaatgaatttccgatattctcttttttgatctcgtgctttgattgtttgtttttcggattcaatgcgaatttcttcatgtttttgttgaacttctttgttcatattctttgagataaagtaatcgtgccagcgctcaaattgtttaaagtctttacgccatttgctttcatcatagttggttccctgatccttgtttaaaagggcagcaattgtttttgtgtcaatgtgataagtgtctttgtttttgaaaagtctgatatgataatcagtaaatgattcgtctttttctcgttgtaaaacagtatctaaaatagctgtcattcagtcaccacctactcattgatttgtggaagttcgtcttcttcggtaatagaaattttcactttccgaccgtcaaatgattttaaaatagaattcagatcataacgctcgatgtctgtttttgtttcttcttcaataatcccatcaatgtaagtatagttaccttttaaatttactgtatgaactttcttagccaaattaaattcctccaatatttgttttatttacgtacaataagctccttcggaagcccgatgatccgaaacatcggtaacgtccgaaaaggggatataaggagatgaaaatatgagtcggataggcgttggggaaacgcccgaaggagattattgaaaacttgcgtaccagaagtctcgtaaggacattccggctgatcagtaaagtaaaacgcaagcacaaaaagacctccgccgtagggtgcggaagcctcgttctgattgcgtctatacaccgagatcaggacgcatcccttactcgctcgcttctctgccggacaatgccggatgtatagttggcgctgttggcttttagcaagctgcgatagcttgacacgccgccttggctattcgtttattatgcggacgaggatttgcacctcgcatggacgaatttcaacaaccgttagccaaaccgactattaagtagcccgttgtctacctcacagcatcgtccttatgttcgtctaagcgtctacctattccgccaccgcatcgttaggttttaagacactcgattctaagattacctgcgcttgattatacgcttcctcataatcgccgctcttaaactcgtctaatttttcccggaattctctatgacgttttaagtaagcgtctttgtcgaatttaatacgtatcggcattttcgtcctcccttgaaaaatatacgaaattagcgtttttttacataatattcattaactcacgtaggtacgcaaaatcgacagggaatacgctgattacgggttcatcgttcgaaatctttgtaagtcgaaaataacaaaagacgccaaataacgtcttcagaaactccttgtacatcatggtacatgagcataaaaggctggttatcgctgtgcgaaatccagctggctccttctacacctggcagatgagctatgataacaaaaatacacgctttaagggacgtgttaaaattcctattacctttacatcttatatatcaagtttttatgttgcttgccaactgctcagtagagtctgagagccaagggaaaaataatttgagaaggaagaccctaataagccttctcaatggcattttaaatgctcttgtcgggttacacgccttattgagaaacaaagcgtctcaaacgctcgccatttattttgcacagttttctctgacccgtgtaaggaggtatgtgcatgggaaaggtaagtctccatacagaacattgaaggagatgaagtgaaataaagtgaacgtgttgctaagtgaaattgaaaaggcaagaccgaaaataatccttttctgtgaaatgggagcggtgatcaatcgcccaaaaaccatctcacttattttgcgaggggatgtaattacaaaaagcctcgctaacccggaaaaatttttatgtgaccgcataataagcatcaaagcttacaagggcattatttaaagggaagggagacgcatctaccttacctaagtgcaagccgaagcaatacaccgcaattaatattcaggctatatgccacccataataagaccctgatgggattcagtcgcaatttgcaataatgcgttaagtcttaccgacatttttagcccgataatagccatttacctgtctctttttagatacagacatgcgagttaacctcgaaccctcataagtgaccattatccgactaactacaatgaccagttgtagctgtaaagtcgaatttaatgcttttgttcgtatgaaagtgagaatagcaatgtttagaaaaagcttaatccacgatggggcaataccccgctaatatccacttatccaaaaccctggcatccaagacctcaaacaaatgaatattagcggagaactgatatcccacatatcagtaaacagcttattattgacgacacccccatgccatcaataaaagaactctaattaataaacctggagatgaatacatgaaaaaagaggggaggtcgacaatttcctccataacttctaactctgccacttttaggagcataagctctatgtgacaaaggcgtgcaggaagcctttcctgtcgtcctcagtaaattttattaagctttcactgcgtcttttagagctttagcagccttgaaggcaggtgcctttgtagctggaatatcaatttcctcacccgattgcggatttctccctttacgagctgcacgttcacgaacttcaaacgttccaactcctggaatcttgattgattcaccttttgttagtgcttcaatgatgacattaaatactgcttccactttaggtgcagcttctttcttagtaactcctaatttttctgcaacttctccaacaaattctgttttgttcatgttttaattcctcctagtgattttgtttatttttgtgttaaagtataattacggtatcgtttgtgcttcttttgaaaaaatgggagacgtactcacccttatatgtggaaattagctttctttctcccttatggcgattatctcaaaaagggctttcagaccagttatatcaagggttcaaggggattttttcgttaaactttttccggtaaaatcgctgtaccccttgggggagtaaggctcaatacactttctatttcgtcatttttttcttactgtattttttttgccttaatcgatggttctttttttcaatttccaatgcacatttattacaatattttgatttatttgagattgacttaaacatctttccacaactataacaagatttaaatctttttaaattattctgcatgttttccaatattagatcgccaaagcactcccataatgttgatttaaatttgcttttctttttatataaatgcttaaccaaaacatcagcaacagattgctcgtcattatagattttcagcaatctgtctttaatgaccttataaacataaagtttttgcccaggcttaatgtcttcatcattcatgagccatttcttgttctggtctaatcgtttatattcacgaataattgcatcgtccaatttaatatccctgttcttgagcaggaagcggtaatcaaattttcctgccactgctgcgaaattaattcggtcagaagggataatggagtctaacttatttactgtgctttcattaattaactcaacactatgttcttctttatcctttgcattgataaagaagtgaggcactttattttttatgtaatctttaattttttcatcaacatgatcaggacgggtcggcatgaataaggtttttgcaaaatcaatagtaaagttattttccatgcataaccatttgatcacatccagatttatattgtcgctgttccatatcttagtgatgttgttgctgtactccccgatattgatcccataagcaagagttagtgcttcatagatgttcctgctattaatcttttgtttctgggctacagacatttcataatacaacggaacgatgttttccatattacgcttggcaatattgacgattaactcatcagaaataattaaggccttatccccgtcattatcaaactgcagcaacttagatatcggatcatgaatgcttgtgtaaacacctggggtaatgaaccacttttcatatttctcatcttttttgttccacctaacaccatgctctctgaataggtgaggggagcggaggatgtcaatatacccttcatcatataaagaacaatggacatcatttcctgaaagcagtccttttggattctggatattcagaaataatttttcgcagaaagcatatagatcagggcataagtatgtataacgagcaccatcaacaagcaattttcctgatttggcatctttaatcatgcttttctttttatttttaataatttctttcgtgtgatcatcgttaagaagttctggatatagaagtaaagcgtcctgaagagctgtccgatgtttctttttctccgtagctccaagaactcttaacatggtttctttgtcagttcccaatgtggtaatctcttttacagtctttgagctcatttgaattaattcttcaccggagatatctgtaagtgtttggagcatttgataagtgagcttcccttcaacagaaggatcttcttcgttgagttttgcccctaagcatccatattttttataattgccttgatattcttcccacgatgaataatacttccacattttaaactggcttttagtgaagataatttgaacatcatctttcactacgtcccattccttgccgtatatatcagttactttaaaagctttgttttcctcagcaaatttgcgaaaatcaaacgggactaataaaccctttacccatgggagtctgaccatgaagcttttgctactcagagtggggagaatcattccgcagccatccgtatgctcaatgggaatgttcattgtttttcgtgtgatctcgtaggtatctcgatcaatatagtcaacgagactcgacacatcagtttctaagtcgtcgacaacaatggctttatcaatatcaatctcccaagggctactggcactgttagataaggccatatagctattccatttgttaatgctgctaccaccaagggagttaatcttttcaatactcaagccgcatgtcaaagcatcctgatacttatcgtaggtgctttttttaatgaaacatgacttctttgtacgaatttgaccggcactgctcgtgaaataaacgtatttttcattgttatgtaaaaatccctgatcaataatgtccttcaatacttcaaaatggtaagtctggacaaccatgatttcctctgaaagggtgttttctttaatccctaatgttcgggtcaacactgaatcaaataaagaaatcactttattgtcccttaagctgtcagttcgaagtgttcttatgtcattatgttcttcgaatgcagaatagaggcattctttaaggtatgtaattctttgtgaaatgtatttcttatgtttattatttacattgtctaatgtcttaagataatctctgtatctataagacttcaaaatcttattatgtaatgaattttctttgtcattataaaatgctgatgtgtccacgctgtatatgtgaacttgcttagacaatccgtctttttttcttttcaatcaatcctctccttactattttatttttactttaaatgtgcttaatattcgctattaagatattgatttactaaacttcgatatgtaaagctttgcttattaatctttccgtaccatttgtaatcctgataaaggtattcttcttcgggtgttgctgtaccatcgactacttttccctcaataaaccccattaaatgactaaataaatactgctttttcatcttacacctccatactattttatttttactcttaaaatgattaaaataaagaccacttcatgtggttgtgtctttattatatattttatttttactcttgtaaacataaaaatccaaagttaattggatttaatttcgattaattcaaaaagatcgtcaactttacaatttagaatatgtgccatcaataaaagattgtatgtactagggaggacggttgcaaatccctcgctgtcatttttacaccatctagatatacttgctctttcagcttttatttgctctgctaaccagcctttttcaatacctttgctgtttagaaatgaatccaacttacttttaaccctatattccatttaaatcatccttttgctgtttgaataaattttataaaatgactggtttacatacaagcagagtatgattatttgcattaagatacaaaaatatttgcatttaaatgcaaatagacaatataataatcgtatatcaaccaagatacttcagaatcatcagatattaaggaggggtcacatggatacttattttgcttctgtcattgacaacttaactcgaaatgatctgtatattctaggcttattgagcgatgaaggggctgatttaaagtttaaatcaattaggaagaaaaccattcaagctaaaactcaactaactgatgctacttttagaaagagcattgatcgtcttgaggccttgcagtttattattatagtgaaaaacagtaaagagcatacaatttttattactcaatatggtcaagaagctttgagatatcaattaaaaagggagagggtttaatgtttggatttattggagttggtcaggccggtggaagtatagcggatgaagcaatgaagagaggatttcattctgttgcaataaattattcactttcagaccttaattcattaatcaatattcaagataagcttcatctggtagggacagaaggagtaggtaaagacagaagcgtagcagcgaaacatatgaaaaataactgggagtcctctattgagttcataaagaacacaatggaaaagccttcagtacaagttattttcgtagttttctctgcagctggtggaaccggttcaggagtagcccctatattattagaattgttaaacgaatgtcttacacataaaacaatagttgctgtaccaatccttcctgacaataatgaggtattggttaaccagatgaatacactggagttacttgatgacttatctatgccagagacctgtgtcttacctttggataatcaaatggttttgagcaaatatgaagggaagatttctgaaagcagactatacaaggagacaaacaagatgttccttgatttaatcgaagtcttactcaattacacggacagaggatcaaagatcagtacattagacaggaaggatttaaatcagctttttgacacaccaggaatcatgactattgctcaaacagacctcaatgaatttacaattgagggtaagtattttgataagctgcatgaagatatacagaagtcgtggaacaattcgatatttactcctgttgagtttacaaatgtgatgagagctggtgtcattctggatgttcatgagtttttaacggagcatatatcgtataatgagctgtttaatgtctttgataacaagatgcccctagacttatttaaaggacattatgataaagggaatagggcaataaccatccttagtggattaacctggatcaatgagcggatgaagcagttagatgatctaattgaaagtggaaacactgaagttaaagaaacaactgtctataaagcgaagaatcgccgtagagaggatttattcaagccgaggaagctggagaacaaggaatcgaaaaagacctcgtatatggaggcactgaagagactaaaacgttaattttaaagggaagctgcctattatggtggcttttttattttgatttttaatgaccccccgggtgatcgttagctataaaagtgcttatcgtaaatgaagatcagaaagggttatttagttgatatagcaatgttttagggctgtcaaaggggataataggtgttttgtgatcgtaaaacgtagacaggagagaggaaaagtggttgtttatttaaaaatctgatgaaaaaggggagaataaggggtggaaaaacattgatattataggcttttacgatagcgattacgatgtgaaaataggctgaaaaatgggaaagtgaaaaaataagtttggtgtggaaatggaagtgctaggggtacatttgttcctattttttggcctttagatgttaatataccccctatatattggtatttaattccctatataagatacgttatgtagggtttttatgatttaggtgataaatttgcacagctaacacaatttcaaatgaaaaacaatatatatttttgaaaaaataattaagcggtcaacttaaaagtgaatacccattcattaaaataatcgtgtatataacgaaaggaaacaaatcgaagtgttatctatacaattcctcatctaactacacacctattttatattcatccttaatgttcatcttttcccatcctcattacattgcatccaccataaactatcctcagcttacctaatcatctctatccgtttccttcaccatacatcatatatccatcctatacacactaagcacacatcatcagaagcattctaatccacctagaatcaattttaatttaatcatagtatcattggtatccaatccacatacacgccttatacagcctataaatagccatgaataatagtgccaaaataatttaaaaaaatccattttaagagtaaaaataaaatgactttgaaagggaaatgtgctataatagagttataggaaaggaggtgtacatagtgcttgagaaagtgggtataacaattgctttccttattcctatcacggttttaatcatcaactgtttaacgatagctgagaagattcaaaacctgatgaagaataagaaaagcaaaaagcgtacacgcaagcgcctccgtagcaagagacaacgcaaacgtatacgcagataacacgctaaaggggaattaatcccctttagtcactacccatattataacatggacaagcacattgtaaacatgaaacgattctcattatggtttacgaacataacatttgttgttttattcttgttgtttctgttcatcaaagattatttcagcagcggaatacagtcgctgattacggctatcttcatagtaacgtgtatcattgtcattttgtcatggatcatttattttactttacgtaagaggttaaataaataaagtttgtggttttctggatattgatttacaaaaaaagatcaaaaagatattgatcatttaaagtgatcatgatataataaagttacaagttaagaggaaaaatacaatgtatataggaggataagaatatgattacagaagatagaatttttgaaatagaagaggaagagacaattgagggatataaagttagacgtgtgaacatgtcagaattagaaatcattgatagagaaaaaattgtatttaagggggaagaggcagaagtagctgaacaccttaactcactactcttttaaatatccattttaaaactctagccgatgcttattagaggtgagcgggataggaaacgaatccttgagggtatacagtatctttccgcgaatgtagaaagtgaccaccgatacaatgataagaaattctctggtcttgaaagacgtattcatgatcttgaagaaagaatcaacaattgaatttcatacatgagaaggagcggtaaaacatttatccgttcctttatttttaatattaaagggggaagtctacacttattatgaataaaattaaaataattgattcggttatggggagcggtaaaacatctgcagcgattaacaaaatgaattctgctggtaaagaagaaacctttatattcatcacaccttatttaaatgaagttgagcgcataaagaaaagcataaagtccaaacaatttttcgaacctaaagtaaagaagaaaggtgataaaacacaatataagtttgaatcctttcacgaactcttatcacaaaataaaaacattgtggcaactcataacctttttaaaaacgcaaacgacgagacaaaggaacttatacttgcaggcaattacacactgatattagatgaagtcatggaagtagtggaacaattacaggtaaagaaacatgatctaacaacactgtttgattccaatctgatttatattgaaaacggttttgtcaaatggaatgaagaaaaaaaagactatgaaacacgatacgatgacattcgagatatggcgttaaataacaatctaatgtatttcaaagacaatatattgatttggaactttccagccgatgtattccagttattcaaggaagtttacatacttacatatatgtttgatgctcaaatacaaaaatattactacgatctgaacaacattaagtatcaaaagtacagttcagcttacatggatggacagtatagcttcattgatcaccgtcctgattatgaaaggagctttaaaaaagagttaagaaacaaaataaaaatatatgaaggaaatctaaacacaataggacaactggagttttcactgtcttctaattggtataaaaataaatcaccttacaccatcaaaaaggtgaagaacaatgtattcaattactttaataatattgttaagtcgtcaagtgatgaagctatgtggacgacttattcagaccataagaacagaataaagggcaatgggtatacaaaggggtttgtctcatgtaatgcacgtgctacaaacgagtttaagcataagaaacacttagcatatacaataaacagatatacgaatactgttctgtataattattttaaagaaaagtacagtattacaatagaccaggacgcatttgcattgtctgagttagtgcaatgggtatggaggtcagctattagggatggagaagaaataactttgtacataccttctctaagaatgaggaagctgctcacaaactggctcgatacctgataaagaggacaaacctcttaaacttaaaaaataagccagtcatatcaacggttttagagcctaagtcttaaggagaaccagaaaaataattaaataaaaaataataaattcgtccgtaaagtgcctttacggccgtctcgtttcagcaagctgaacctcgataataggattttctttatttagaataaaaataaaatatctattgattattttaagtgatcatgttaaaattaaatcaagtcaaaggattacatacatttaagataaaaataaaatagttataaagaatggagaggttgaaaatgacagctgttttaagaattaatgaagagttaaatggaattgaactatattttgatagtaaaccagaacaagaggttttaactcatcttaaatcaaacggttttcgatactctggattcaaaaaatgttggtggagcaaacggacagaaaaatcaatgcaggtcgctaatggtgttactaaacaagaagtctcatcttctaaaacaatcacaaaaaccaaaaagaaagctaatggtgtaaatatgagtctgtgggatgcaacacaatggagtgaattagaagtaaataaggaacaagaagtaaaagaaatggcaaaggaaataagaaagcatttaagacaacgtctcccacaatgcaaattctctgttactactgggggtagctattcacatagcactattaacatcacaatcaaatcaagtccttatgaaaaaggctcagcttatttgactgcgatttatgattattgcaacagtcttttaaacaattatcgccattgctacagcccagcagatccttacactgactatgctggaagctacaatttctatggtcgtgtttcattagattgggaatacacagtgacagagcaaacagaagaaattaaagaagatatgacactgtttgattcaaagatggaagaattcgaagaagccgagaaagcgagaaaagaaaaagaatttcaggaatatttaaaagaacaagaaatcaaaaatgctgaatataagagacggcaagaagaaaagaaacaagccgaaaatatctatagcagcattgtagtaaaacaactgaatgaagatcaagagtattttgttattgatgcacagtttgccaacttaaacaaaaatcaagcacttgatcaatataaagacgaggttgctaaaggtgactacagacttgaaaatgtgaaaattacaaaagaagtgcatttcaatactgaagaagctttaaacaacttttctaacttgcttttaaatgattttgattttcttgcggaaaccggtggaagttttacggaagacaacaggatcaactcaatgattgattattacaatatggacgatttagaaaagaacacagttaaatggaatttatatggcgtaggagtgtactacggcgggaaattgcaatttattgtagacgctcaaggccattcttatgcaagatacgttggtttagtggacaatgcaaaaattgaaaagtcaatttttgataaacaagcgataaaagaaggagaattagacgagttaaaatatcaagcgggaaaaatagaagatctttctagctcagtcattgaagaattaaatatatttgcaacctggaataatgaagactgggacaaatataaagctttactcaaagaaaaattgaaattgaataatttaaatttgagtaaaaaaattatccaacaagcagatacagaggaattgaaaatttctttatacagaattctccatgaagttgacagcattcaagaacaatttaaaaatgctgatcttgaaaaaggtgaaaaatatactctgttttacatatctgatcttggatctttaattactgaaaaaataacgtatgacagttgccagtcaactaaatatgctcaatatgataatgcagtgaagttgacatacaagcctgaaaataaaagaaatttatattaccgacacttctattcagaattattgatgttcaaagggtggcactcgctgcccgaaactgtgttgaataatgtagaggttaaaccagatgggactaaaataattcacagtaagtactactcgtgtgacaaaagacaatttgacgaggttctaaattacttaaataataaaagcttcaaacctctaatcaacacatataaacctagtctataaaataagaggggatgagaaaacatctcattccctaaaaagggagaacaaaaaatgtttaaagataatccggatttttatccgacaccaccacagttaatccgaaaaatgacatcaaaaatagaatggaagcatattaagtctgttttagagccgtcagcaggtaaaggggatttggtagaagctattcacaatcaattcaaatacaccaagaactatagagggaattcgaaatatgatattgattcaattgaacaagatgaaaacttaaggcacatccttgaggggaaaagttatagagtgatagcagacgattttctgacgtttaacacttacaagaagtatgatttgatttttatgaatccaccttttagcagcggtgttaaacatttattaaaggcgattgaattaattgaaaagcaacaaagatccggccaaattgtttgcttactaaatgccgaaacattaaaaaatccgtattcaaatgacaggaaatttcttatacgtaagctagaggaaataaatgcagaagttgaatacattcaaaacgctttttcgaactcagagcgaaacacagaagttgaaacagcaataatttacataagcattgaaaaacaagaatatagcagcgttctaatagaagaattgaaaaaagatgagtcacatagaattaatgaggattataaagcaacacagttggtggactttataaaaggaattgtagaacaattcaactatgaaatcaaagcgggtttaaaattaatcaatgaatacaacagtttgaaacccttaatgctgcatagtttcaatgatgacagtactccaatattgaagctgctaattgataagaataccgaagaaaatgacatagagaatgcatatataaaacaaattagggcgaagtattggaatacgttatttaacaatgatcaatttatggggctcttcacaagcaatctgaaacaaaagtatttggagcacgttgaggaattaaaagattatgacttttctttgttcaatatctatacattgagaattcagatgagcaaagagatgacgcagggcgtggaagatacaatacttaacctttttgaagaatttagccacaagcattactatgatgaatcatcaaaaaatgtgcacttatataatgggtggaaaacaaataaatcatataaaattaataaaaaaataattattccactaaacgggtattgtagttggctcggtcactatagtccaacagactacaaggtcttagaaaagttgaaagatatcgaaaaagttttcaattaccttgacaacgggttaacagaagacataaacatagatgaatctctaaaactggctaagcattacggtgaaacgaaaaaaatagaattaaagtacttctatgtaactttctataaaaaagggacatgtcacattgagtttaaagacaaggaaatgcttaagaagttcaatatttttggcagccaaaagaaaaactggcttcctccttcgtatggcaaggtaaaatatcaggatatgacggcagaagaaaaagacgtaataaatgattttgagggggcacaatcttacagtgatacggtaaataacgcttcttattatatactggatacatcgaagcttctcttgcttacatcataacaaaatacacactttaagaataaaaataaaataagtattgattatttaaaatagtcatgatatacttaaatcaagttaaaacaacagcgaaagcatacatattttaagggtaaaaataaaataaaatgcatattttaaacagaatggagacattaagatgagtacatatcaagtagatttcaatcaattcagaggaagtatggaaacaacatgcgacctatataatttagataacaatacaacgcttcaaaccagcctttaccgtaatactaatagcctttgcattgaatataaggtaattcagcgtgatgataattcaaatagttttgcggagtacgatacacttgcccgtggttacattgaagtacctttgacttacaatcaatttaagaagcctgtaaaaaaagtttatctaaataaaataattaacgcactagattttattattaatcaatatcttattatagaagatacttctcaagaaattaacgaacgagttcaaatgaaagtgagtgcaactaaaataaatgaggaagatcaatctgactttacgaatgaaacctctaattcaccaattgatcaaattaggatggaaagatgggacagggaatatgacgagggagttaaatatttctttgataaatacgggaataaacgtataggggatattatttatattgatacacagcaagagcttgagcatttagaacacatagactgtgataatgtgataaggatttttgtagacaaagagcatgaaaataaaattaaagctattgtacttaaagatataaacaaacattatcaaagaagtggataaaacaacaattttatacaggagatgatgaagtaatggcagtaatgaaagaagtgtcaatagaagaatatgatttatttagaaaatggtatttaaagtataccaatagcagagtcctaaaaacaaaacagagggcagggtttacggctgttcttgacaagaaaacaaaagaaactgtttgtagcgaaagtcatcttatggggaaaagtagatacttaattaaacaaaattattatgatttatatgcagaggaggatgcggagtaatggctaaatgtaatgattgtggtaatgaacgttttttctacctagaggtatcggtgggagccaaacagcttattgatacaacaggtggagctaggaacggaaagatttatgatgtagactattcagattcaggtatagacaatatcttcaataaaggtagttatatttgtaaaaaatgcgaatcgaaagacgtacatcatgaggatggcgaaggtgattataaactctataataaatctgaataaaacagcagtttaataggaaaggggaattatatgcgtgaattagaattattgctcttagtgatgtgggcagaaaatggtgttaacgaagtttataagtataaaaatagaatcaaggcattccgtgatccgttggttaatatcgagttgattaatgacttgagttgcggaggtatgtttgctgacattgacgacgttgcaaaccacaagaatgcttcgtcagtagattataaagtaagtatcgcaaccttagttgaaaatagaagataataagataaatattttattaagaggaatgcctgtctaaataaaaacaccatttaattcgaaacgcttctttatcatcgcaaagaaaaaatgtaaaatccacctattggcatgagttgtcaatgatattgagacgtcattggggggagaaatttgaaaaataaacttgaaaaattgcttcttgaaaagggtgtatgtgaatttcatattaaggaaatgaaggacaccaaaaatataagtgagtatccatatgaattgtattatgatgaagtcggaaacagcgaaaaactatatcgggatgtcccgttaaaaaaaattaagagtttaggattcaggggaaccagtggtgtgtcttggtttgatcacgcgtgttataacggtacagataatattgacattggccgatgtgaaaaagcttttgaatacttaaaaaaacaaagtctagaagaatttcacacttattatcaacactcaccagtgaaattggttcattatgaagatgatgacttttatgctgtttacggtgatggaacacaccgtacaatttgggccaagataacagaagctccaacaatttatgctcaggtaactagagcaagaaagaatccttccttatataaatcatacttaagatttaaagaattagaatcacagattaataggtattttaaggagaatgaccttagctggggagttaaaaaaagccaatactattcagaaatcctttacaaaggtatgccagtagcactctattctatagatccgccttactcatttaaccgatcttcctacagtctcaatgatcaaaagttggatacatggaataaggaattaaatgaatttatgattgagtttgaagaaagttttcgctataggaaaatctttcgcaatgttatgaaggttacgcccggaaaattagagcacaaacttttttcttttattgaaaatttaagtgaaagttggtctacagctaatggaaaggcaagaattataaaacaaggattcgatatgtattgcatcgataaaaaaatcatttaagttactttaaaatatgtacaacagcatgagggatgacgaagaaactaaaggagaagtgatgaaaaagttaataattttatgtttgggtattatcggggtatttcttatagttcagtgtagtaaatttaacaacaatacaaaagtttatgtggatactcaattagaggtaaatcacgatgatgaaaatgaaagaaaaagttattatgacaatgattcaagccaagaaagtgaagcacttaatgacaaatatttaaacaaagaagagaataaggaatatgacatttacgcatatgatttaaaaactagggaaattcaatcacgtaatggacaacgtgaatatgtttatggaggcaacgtgatctctagcactcaagccgaaaaatatggttatcatacaacaccaattactaaggaaggagataaaacaatcaaattttggaggaacgatgtaaagtttgttcctgaaaagggtgagattgtcctggttagatttcctaagggtaatcataaaacatttgttgatattgagcttatgtataagccaacaggagagcctaatggagaatggaattggtgaacaaaaacactactttattttaaaacgggaatcgggctgcctacataagaacagcccttgcagttagctcgcaatccttgttttgactggtttgtttttcttgatattacgtaatttaagagcgggtttttccactattctgtacgaaagaaatgcggatgcagcagtaacagcaattagggctatgatcagcgggtaatcagacaatgttttattaattccagtgtataagaagatgttgatgatcaccatgtgccatatgaaaatccccatacttatatcgtctaaccggttcagctgtcgcaatatcttcggcccattgtaaccaaaccagacgagtgcatagctcagaggtacgaaccataaaaagctccataaggtgctgtttattgaactgagatgcagaaggtcaagtttatagaataaaaataaaattaccgaagacaaaaataaaacgatatgctgcggtaacttgctccatgccttagcccagaagatgcccaaagtgaaataaaacatctgcggcaggaaagaatgtaagtacaggttaccgaacacactgccaggcgcgaactttaaaattatgaaagagactaacacactgaaagcggaaacagcaaaagagcaaagaatcatttttgggaatccgaaacgtttataaaaccaataaattgcgggtaacaccaggtaaaagctaatctgaacaggaattgtccaaagtgaatcgttaaggcgacctgtgccgatgtgatggaatatgtcagggaagtattgagggtataacacaaaattgctaagaagccatgtccagtactctttagtagtgaatactgttaatgaaagagctcctagaacaattaacaggatggtggagacgatagcataggtgtatatagcgggtgcgatcctaataattcggctccaataaaaatcggttacattattacctttaagctgagatctctcataagaagtaaaaagaaaaaatgcacttagaaaaaagaagattgatatgccggtgtgaaatattgctttgctctctggggtataaccaaagacagaaatatttagatctcttgtagcatgaccaatcaacacacaaagagcagcaaacagcctgataacaaagaaacagttagaatgttttacgttcattaaaagaacctctttcctataccatatggcgaataagcagtaaggctgcctataagcagtgatgattatatcataaaaatggaagatttgttcttaaaaatgaactaaaataaatatttttgttcttaataaggtatatttgtgtgatgtagggaggtatagatacttataaatacacgtagatattcatagatacatgtatatctagctatatcaaggagaatgcagataaattaagaagcctctgcctgttctttcacctttatttccaatatagtataatttggaaaagggggagagggaatgaaaaagctaatctttttggctgtgatttgcattggttttatattgagttttaacacaccaagtgctgaggcgaagcttacattagactacaaaaatgtggattttcacatgagtgaggattcagagagtttttcaatggcagattattttgatcggaattttgatcgcacttggctcttctacaaattcacaattaacaatgctgaagggtgtactctaaatatgaaaatcagtaggataactcttgctggctgggtatttccacgtagtgagaagcagtttgtagggaactatgctgactatactgctacagatcgagtagagggagatgctaatcgtaatcatgtgttagagattacaaagaatccaggctgcggagatgtgtggattaaaggtatttatggatttgaacatgaagattcatttgattggtaagcttgatacatagtcaaggtatatccttgaccttttttatggatataatgataatttaaagtgatcatacataatgaatgcgaggtagtaacattgattaaatcaaatttaaagccaatattagacgaaaggaatatcagtattcgaaagctgtccaatgatattgatcatggttttaacacagtcaggaagctgtatcatgatgaaatggagcggtacccaagggatctgttggataaagtctgtacatatttagacattgagctgcatgagctgttgatttacaaaaaagattaaaaagatattgatcacttaaagtgatcatggtatactaaagttacaagaacagtaaatacttacaaattttataggtctacataaaatcgtactttcatagggaaaagaggaaaagaaatgttgccaacttctttaaaagcaaaagttcagcgaattttattaaaaggtagctttaaaaaatctgagagctctaaaagcagagtaaaaggactaagcaatatttcagcgggtttcacttttgagaagatgtttgacgacggttactgcctctattatacatgcggtaatatgactttccggggaatgccaaacgaaaaaaaggataatcaaacagaaaaaatgtatcacttcttattggatcagggtcttcaaaaaaatattgaattgacagagtttggaaataaaaaagtaatcttgttgaaagtggaataattgcgagacactttgaggagtagcataaatttgcactttacaacaaagggagagataaaatgagagaggaaattcaagtgttacttgaagaaattgaagaattagaaatggctttaagtaagtccgataacaatactgtttctgtggttcttcaagaggcaattgataaaagacgcaatgaaattggcgaactaaagccaaatgggtacgtcatagcagacgtagtccttaaagacggtaccgagttaaaacggtgcttagtttttactgtaacagatcgactagggtcacaagctgtaactgaattagttgaagcaagagaaatcttcgaaaaagataaagcggtttatttgcaacaggaatatgaggatggaaactttgcaggggatataggagtacacgaaatagcaacatacaaccttgaatatgaaaatggtgttaatgaataaaatcattctttcatcttaattaataaaggagagtacataatgtatagattcatatcagagctgaatttagacgactcgacaattcaaaggatggataaatcccaaagctttaaatacatcggtggtttttatatgtatgatccccagcaaatcgaatggccaatcccagaaggagaatcatcttcgctcagtgatttagcccatttaagttttaattcttatgactgtgaaaaccaaatgatcgcggatatgaaaagggaattcactgaagaaaagttgttaaatatttttaattctgagtgtccagaaacagcttttaatgacgctgcttcaagaatcattgaaaaatataattaaggtgggttttaattggctagagataaagaatgggttaaaataagcgaactttctgaagaagaaaaacaaagcttgactgccggtactgcagttctgctgcatgataattactataatgggtcgtcagaaaaagcttccttgataagaaaaaaaggttctcaaggaagactagaagacaagtattacgaattgaacggtcaaatggttagaattcttttcggaagcagaatcttaaaagtcccttcttctttattatctgttccagttgcaatcgacagggaacaggaagtcgaactaaatctttcaccagtccaaattgttaaagttatgaagtcattagaactgttactagacttagacaaggaagaatttaaatttaatcgagaagagattgtcctattattggagcagctaagtaagaatctagatagtaatggtattgatcctaacagagtaatgaacgagctgttttcaaggattgattaagttgaaatgaaaccagtcttttaaccagttatgtaagtcaggttgagtcaggaatacttttttgaagggttagatatcaaatgacgatgctaatagcagttaaattcgacaatagcatagtaatgactgctgacaaaagagtgactactacaaatagcttgggccgaattttaaaagtggaatcagatgaatataagaaaataaaaattattaataagaagtacgtaatttcttttgcaggtagaatgtttattgcagaaaaagcttttgattttattgatcaaaaaagcgatattttgaacagtaatattgatccactcttattttttagagaagcttttaattacggaaaatcatgttttgaagcatattattctggtattaacccactttccgtattttttgttggatatattaaaccagacgaaagaccacaattgttggggttttcatcagatgataattaccttggattagaaatcgattcaagtattaaaattaattctaactcccctgatcacgaagacatgcttataagcgaaactgttaattttatttcaacagaaatgtcaaaccgtcatgcctatcatgcaaatgaaagacttttagagatttattcggaggcaataaaaagaaccaatgatccaatgatcggaaaaacaacttactctgttatcttaacttctacaggtgccgaagaataccatcattaatgtaaaacagcacgtaaaaattataattaagtgaggagaatgtaaatgatcaaggtttatacaagaggtcataagataccaaaaaagattaaatcttgcatctctgaatgggattattggtcttggattgtagttaccaatattgcaaagaggaacaaggatgcgaaacgactaatagagaagattgaaactgatccagacaggattgcagaatataaaactgaagatggaattgaagtttatgtaagctacatgattccagtgaaatagaaaagagcattaaactaaatgctcttcttcataccacatctacgacactcacgtaaaaacacaccacttttcactgaactcttgaataaagcgtaatcacagttgtcacagcgaccatatttaacatcgggatactccttataatcatatacaactgttacatcgtagccattagtctcaaaatctttctcttccattaaatttcacctacacaaagtatttaacactactataataccagacgatgtatataaggagggttttaatttgattggaatagcatatttcttaatgctctggcttggtgtaggctttctgacaggatttaaggccttatttgttgatcaggtttatgatgaagagtttaagcaggaactgattgattcattttcaccaggtatggagcagaatatgattgaactgttctttaagaataaaataaatatcatggtgttttacatattaattggattgctgccactggccataaaaattgctggtctgctgaagaggagttagctatgcctgttatcgataccttttttgttattcaatttgaaaatgatgattacttcaagtcatttaaattagatggaagtggttataagacatctaagggacttcatggcgcttctaagttcattacaatgtcagaagctttaatgatagcaaacgagctgcgtacagagtttaatgtcacttctgccattagacaaatcgaagttattactaggtgatggggtgttcaggtgtactggattgaatggattgaggatggggagaagaaaagtattgttgtggacggctgggttgaatgggccacaatcctggaagacctttatcagcagcggtttgagtatgttgaatggaagcggctttaaaagtgttgacagaaataaaaatacaactgatgagacataagaacctgaaaagttactagggggcatttttttggacagcagaagtaagatgagatatatgccaattgaagattttccaaagaaagcttataaatacatggaagcgaaatggttgaaaaaattaatgagggacaagaaactttttgtaaatcaccttaataactatccagagtcaagcttaggtgcggatgttggagatgaccaagaaggtgtagcaaacagacatttaaacattaaaaaatataaaacaggagaccataatccacaccttcacaatgaactacaagaatggtttcctgactcaatagttagacttgaagatgtgtcatttcaaacctcaataataaataaaaatttttatgtttattgtttaactttcaattatgataaaaatattatgagaaagtttggaggttcagtaatggtaattaatgattttccaagtttcgcatattgggtacacaataaaatgaaaaaaagaaattgtgccttatatgctgcgaataattgcatatatagagattcaaggagcattacttttaatgaggaaaacactgatttttatttggtgccaggccttattaaagatagtaagcattctgaacaagaagagtttagatttctttggaggaaaaacgataattctttaataaacagaccaattaatgatctttatgtaccagaagcattaaagttttgctcctttgaaattaatgaataaaactttatattgtttttatggtttacatactacgttcaattatacgtattgaatttgcaaactttttaaatgtatttataatcttctttaaggagttgatttaaatgaattgggtatcttacccctcaattttacactatgctaatgatggtattacagtaaccttcccagaccttcctggttgtataacttgtggagaaaatgatacagaagcaattagcatggctaaagaagctttaggtcttcatttatacgggttggaaatggacggagagaagtatcctagtccctcaccgttttcggaaattaagacaggggaaaacgaagttgtgtgtttgattgatgtgcctatgcatgcatttcgtgatgagtataggcgtaaatcaattaagaaaacattaactattccggcttggttaaatgaagtggctgaagaaaagaacattaatttttcccaggtgctgcaggatgcattaaaagataaactaggactaaatatctttaaggcacagtaaggattcttattgtgccggttcatataaaatacgaattttaaacagataagggttccttaaaaaataattagaataaaaataaaataaatacttgtaattctgacaactctaatgtatattataaacaaagggaacattagttgggaaggggtgtagtaaccaatgaatcttaagcagatgattaagaatgaatgtgaaaaagacaaccagctcgcagcgaaactctcaaaaatagcagggtacaaaaaggttaatggtttttacaaattcatcaacaccccagagaaagaaatggacaacttaggcggtttaattaatattgttaaaagcttgtttcctgataatgaggagcagcttctaagtgattacttcttatcactggatcccaacaaaaaatgtgccagacaatctgttgaatactcagatattaatcaatgggatacgttaacagacaagatagtgtcgaggctatctagctcaaaaaacctagcaagtcaagaatggggcaatatatacagtatacatagaagattgagcgaaagtaagataagtttaactgatgcaataagagcaaccggaaagtgcaaaacagatgaaatgttatttttctcaaatgctatgctgatgtatgagtatttgaaggtaggcgaatttggattgatgaaaagcacattatcacttctcaatttcaacgacttacccgaaggctttgtgaaagattgctatatgaatagaatttcattattaaatgcaaatatttatttaaatgataatgaaattgaaaaatctaggtattattcagaacaagttattcaaaattcaaatataaatcgactaaaagtatttgggcatctaacatatgggaacacattaatttttgaaagctactctaaagccaaagagcagtatcttaaaggattggaatttgctcgtgataatgaacatcataaatataagctgcgattagctctttgctttttaagcaacctatggaataaggataataaatggcttgacttcgacactgataatatccctgataagattgaggtagcatattactatactaataataaggaatttaataaagcagagaaagtaataaatgagcttgagaatatggaattgtacgaatatgattctgggattctagattacattaaggggattctataccaaaataagaattatttttatgaaagcactgcaaagttgaaaaaatctggtgataaattatttatcaatcttccattagcggagctaaggaaaatgggctgtgacgaaaaactacttgaattaatcatggtctaaaattgaaggggggtgaattaaatgaaaaatattattcttggaatagtaatcttgttagcaatggctgttggatttgttgccggacagcaatcaattgagacagcatcggtagaccatgtagaccagcctgtaaaagttgcatcaccaagccgcggggcttaacttcaaagataatacataacttggctagacgtttgatccactggatcaggcgtcttttctaattttaagagaatgttccagaaattcataatataaaaaacaagaacatgggggaattaaaatgaaaaagcatttcggacaagtactttcttatgaggatatggctaaggggtacatggaaatgggagatattaatttagaaatttcccaggaagataatcatcttgaaaatgaagcagaaatggttagatcaaaatataaagcaaaggtatcctaatgaagattaaagacaaatcagcagacattttaacacatacataggggatgtgttatttgtcttgaataaaaataaaataaattgttgcatattattctagcaacatatataatgaagttacaagatgaacgttgttgggagatgaaacaatggaaacaaccagtgccactcaaaaggaagagttgaagattacatcattaagacaatatcaatacataaaacaactaaagaacttcacacgagtcaatctccacctagaggatccagatgtgtttacacctaataatgtaactacaatgagaaaaaatcataaagaatacaacctcattaaagaacaaaaaaattctataaaatgtatttaaggagtaaaaataaaatgaataataaatattatacagaagaaaacaaggctaaagtttggaaaaagcatatgatcgttttaaagtttctagagcagcctgagatagcagtagcttataatgagttcctacgaagagaagcgacaagtgatgaatgggttgggttcgaagaggagctttatgaggaattgacggggatgccaattataaacgtctgtaaggacgagagggtaaatgtcctaaactgaattttattataggataaaaataaattaggtgtgataaaatgaatgcagacatcttaattaacgctcttaaagaatacgacatgttaaagcaaatggaaatctgtaacgccaatataatgctgctgagtaatattcaaggtgagaatgaatggattgttgcgtggaaagaatttgatcaatacttaatgaaaaaaatgatatgaggtgtcattatggaagctcaaaagaaagcgtcaacactaagggattattcaatatacaataacataaataggtggtttgatgaattagatttaagaaacagggatcgagaaactggagaaattgaaaagtctaatactagagccacgtatgaaaggcatataagagagtttttcaaccactatgctgccaaggatattgaatatttaactgagagtgacctggcgattaagaagagtgacctgtatgattatcgaacccatttggctaaaaataaaagcaactccaattcaacaattaacaataagattgccgcactgaaaagtatgattaagtaccttgaatctgaacatgagtgtgatgcatctgtatttaattttagacctcttccaacagaaaagaacccagcaggctcttttgaaggaatatctgaagctgatgaatttgctgaggcagcgtatgttactgagcgtcagaacagattaatgaaaaagatgtttattttgtttagtgcacgtactggtggacgtaaatcagaggtacttagagttgggtgggatgatattacttattcagaaaagcaccaatgctatctcgtcaactttaaaaaaactaagcaaaaaaaggctagaccagttgggatttccactgctttttatgaagagttattgctgttaaagcaagagtatggggaacatgagcttttatttcataagttaacagttgattcaatacaggatatgtggaatcgcgtatgtagagttatgggcattcccaaagaaagaaagataactccgcatagtttacgcaatactgcaacaaacttttcttacagcattaatggtgatattaaaaaagtggcagcgttctctggccacagcaatatcaatactttaaatgaccattatttagtcaatgaaagggattattctcaagatccaggggttttggttgatcaaaaagaagacatgtcctttttagatgatgttaccttagagcaatataaagaattctttttaaaatcagacatgtatatacagaataaacttaaaatgtttttgaacaagtgatacaaataatcatataaaagctttacttgcttatgaaaataatgataaatttaatatgattatgtgaggtgataatgtgtctgaagttttgttgacaacggataaactttataagttaaaaactgaaatagagaaaaatcttaatgatattaaaaatgatcccaatatggtgaaggaattaaaagccacaatggcggacaaatacaaggcactccctggttatatccaagaaattttaaataataatgataacaacgtacagcgtttaaacgaaaaagaagtgtacattgtttcaaaagagttgtattcaattcttgggacgcaagctttagatccgtcaaattattttccaaccagattggcaaaagagcttgaaggtgggagagtattcgccggtgaagaagtagttaagctcccctacaagtttaaaaatgtgattaaaattaaagaggataactatgtcacttccattactgccaaagaactgagtgagttatataatagctccatcctgcagtacaattacaacactcagcgagaaggaaagtacattaagggcagccttattcctgtacctaaaacaaaccctaaatcagttgatgagatcaaagaattgtttattaaaggcgatttaattgtatcaatgttaacttttaacgctcgtcttggaacatctgatggtgatgaagaagttgaatatgattcaagcgaccaaaccctcactgtaacacgaggaaccttattagatgctcttgatggatatcatcgaatttcaggtattgttaaggccattgctgaagtccctgaattagatcaaccattcattttaaatgtgctcaattacgatgaagaaaaggctaaggttcactttgctcaaatgaatacaattaacccagttgaaaaatccagaattgaagaattgggtcaaaaacggtattcttcaaccgttgtcgagcagctgaaatttaaaagtgaacttaaaaataaaataagcccacaaagtgaaattgctattgatagcaattttcttgtaacatattatactttatccgaagctatagacgatgtatttgagttgaaatctcgaaaagatgcgttgaaaattgcgaaatacttggtagacttttttgataaccttttttatgcattcccagacgaatttcttgaagatgatttatcgtccattagaaagcaatcatacattaatcataacgtaatgttttacggttatgtttatttggccaagaagatgaaggaaaacaatgtagaactaaacaagcttgaaaatatccttaatacgattgactttagtaaaagcggaagagtgtttgaagaattaggaagacaaaataatgagaatcaactaaagaatattatgaagaagaaacttaagcgaatgttttatgatgaaattgctgttgtttaaagcctaaaggagaatttaatatgagtgaaatatataatgctgaattgaaggaaaagtttttagagaaatacgaaagtgaagcaacaagaaaccattattggctaaggctaagggatttctcagctacagaaaaaatacttcaaaaagacatatttaatttttctttggaagagctgcgtacgttatttttagatttagatagcaaatctatagattcactaagaggagcaagagctgtaattggacaatacacaacctgggcaatggaaaatggcttggcaaacagtaacatcaacaaagtgtatcagatacaggatggtgacttaaagcagtttatagataaaaacaaaaaaacactattcaccaataaagaagtagaagagtatgttgattttatggttaatgatcaggataaagcgatgatacaggctatttatgaaggcatagatggctatcagcattcagagttactgaatttaacaggtgacgatttacttgatgataacaaggtaaagctgatagatgataaacacggtgtaagaataattactgtaagcgataaatgttatgagttgcttaagcgtgctaatgatcaaacaacttatcatcttagcaatggttcgccagatagtggtcttaaaaacaaatttgctacattagttaaaagcaaaaacatttttaggctaaaatacaagagttctaatcagagtatgaaagctgacaagtttttagttcaccgatcttttagccagtttcaaaaatttttagaagaacccttcttttcacctaagaaccttatcaactcaggaaagctcaacatggcgtatgagatatacaaagagaagggtgaattaaaagtacctgattataaaaaaataactcgacaatacgggtttctgaatgaagacgcggagtttaattcacaatcactgaggaaagtagtgaatatggataacttagaaaaatattgtatcaagtctgaagtaattgagactaattcttaatccctgttgcagggattatctttacataacttttagagtaaaaataaaacatgtgcggataaactcgtgatattttttcgaaaaatatcaggattttgttcacatttttcagaattcgacaaagttagacagagacaaatttgtacatatgcagtaaaatagttctataccctaaaaagggtacaaggaggttcgctaggccaaactccctagcgataaagtcaatgtttgattttccattcatagagatcttcaattgaacagttaagggcaatagcaatgattttcgctgtttttatattcatagaaggtctaaagccgtttgcatagtcacttaatctttgcgtactaatgcctgttcgctttgaaagttctcctaatgacattcctttactttcgaggagaatggaaatcaaacattgtccgatttcaacctcaagcatcggacaacctcctgttatagtattgcttatcatactatatcaattctttccaagtttttaaatgaaagaaaaaagatttgccactaactaggtaaaaggttataattaagtcaacaaaaagggaacataagttcggttaattactaccagagagagggaaacgtatgtcagaaaaggattattttattcaaggggagctgtgcattcctttttttggcaggataaaagccaagaatgaagaggaagcactcttgttcgcatatcaatcaattaaaaagaaattaagaaacaaaacagggaaaatggggtttcttcaaaaagatcaagaaaaatatgaggcactatttgatgtagacatcatgtgtacagaggatgctgaaataacaacctcttatgccgaagaaatagacgattcgtttgaaaatgaaggctataaatcttctcaactgttatcaataaaataaaagcacatacacatcttgtcagtcatcatgagacataaaaaattggtgactttttagtcagactggagcatacaatggattttaatcttgaaattgacttgaaagacattatgagatcagtttccatgagtgttggttctaagaacatacaaagtggagagtactacatagacattatctttaaaaacaatggggattgtttgaggattagaatggatcatgcttcagttttagaatttagagacaaaataaatgaaactctttggaaactggacggcatgaagacgtttatgaagacagcagctttacagtatgagtaaagctgatttttttaaaattatttagaataaaaataaaataagtatttacaacatatggttgaggttatataatcgaattagaattaggaaaggagatagctttaattattgattaatgaaccaactaataatcaaataagaaccatggttttaaagaaatatgcaaagctcttagcgtcatgtgaaaggtcattgcgcagcatagagaataacgaaataagaatggcaattggagacctagattttgttaaagacaatttagaggaaatacaatacatactccgtgatgttgtgaatcagcatgaatgtattaagagtaaaaataaaatttaagttttatagagattaagataagggggaataacatgggtgcattaatcgctaagcaaccgaatggacggtactgccgatttagttcagtggtagactgtccaacgcacataaatatgacgcgtgaagactatttaaataattttactgggacaacaaaaggaagggaagatgctgaagatacacttgcaaattatctccggccgtttcacgaagttataaagtggtacacaccgctgaacatgagcgaaaaagagtttgtggaggcgttaaaagaaatgtgtgacgaaaacccaaaggaggcgcgggaattgtgaacacagcatacagggtgtgggacggcgagcagatgcattattgggatgatgaagggttgagccttaccatcaaaaataacggtgattggactttgaaacgtttatacacagatgttttggttcccgttgtagacagcacgaatagaaacgcggctctcatgtggggcacagggttgaaggataaaaacgaaaaaatgatttacgagaaggacgtcataaagtttaaatctgtctattgcgaaaacaagattataaaagcagtggtcaagtttagagattctcttgggtcgtttgtattcaataggggagacgatcaagacttttggagaatggacgtatccctaagtgaaatcgaagtcatcggagacatttatcaaaatcctgagttattggagggcgcggagtgaatgctgaagtaaagcgtgttgaatataagctgtggtacgaagttaagtacggatggaagcatctcagtttcggcgccaatgatgataaaactgcattggaatacgcagaggaatacgcaaaaaataactacctcataaattataaggtggaaaaaataacgaatgagagattgttttggactgaggagggcgcggaatgagtaagaggtctaccctgttattaaggaatagtgtgaaagcaggacaaagagaaaaattcattacaaatggcattccctatgatgaacttgatacacaaatgatcaatttaattgatattttgaatttcatgattggattgaaaacacgccactgttgttttggacataaaccatatgaggaaattcaagtaatgtttgaagaagaagtaaatttaaaagaagatcaaattctagagttagcggaattagcagggagagaatggaaaggtcttcagttaagctttagcaaatgggcgagattttctccattgatgtttaattggtcattggtactatcgaaaagatttagagatccagaagatccaaataaaaaccgttagctaagatcagttgaagaattctttgagagctatgctgcaaagaagtgattaaaagatgcattttaaacaaataaaaatcagaaaggttgatagaatttgagaacattagtgttattaagaggctgcccaggagtggggaaatcaacttggatcaaagataatggacttgagcaatacacactttctgcggacaacattaggctactgtttcagtcacctgtgttaaacaaaagtggaaaatatgaaatctctccgaaacacgataacaaagtgtgggatttattaatgaaattgcttgaagacaggatggatcgcggcgaattcacaattgtcgatgcaactcattcaaaacaaagtatgatttcaagatataagccactagctcaaaaatatagataccgtgtacatgtagttgatttttctgatgttgatgttcggagaatcttaaaaagaaataaaatgagggctgaacataaacatgttcctgagagtagtattctaaatatttatgaaagaatgacaacagaaaaagtgccatcttgggtaactgttctaaaaccagatgagttcgaaaacacgatgacttataagccaagatgttttgacgattataaaaagatccatatttttggagatattcatggctgcaatactgtgcttcaagagtacttaaacggtgatttaaatgaaaatgaactatacatctttgtaggagatcttatcgacagaggtattgaaaatgcacagctgttagaattcatgatcaaaattaaagattataaaaatgtgattattctggaaggaaatcacgatagatatatcaatatgtatgggaatgatgaagaaacacctagcaccacatttaacaacaaaactaaacctgaaatcgaacaatccaacattgataaaaaagacattagacagttggccaggaagtttcatcagttagcttactttacatataaaaacactacatacattgtaactcatggaggagtttcaaccgtacctgaaaatctcttgatgaccgcaacaacacaattcatcaatggagttggagattattcagacgatattgattatgaatttgcaaataatactgcaggtcaaaatgttgtacagattcatggacatagaaacatgtaccgtctgcctgtgttagcagcagaaagatcatataacttagaagggcaagtggaaagaggaggtcatcttagagtcgttacactgtctgagaacggaattgaaacgcatgaagtgaagaataaagtctttaaacaaatttcaagtgaagtacagagtaacagtgcaactgttggaacaattgatgaattgatttcacacttacgtggtcatgaatatgtgcaagagaataagatgccaaacaatatctcttcatttaattttacaaagcaagcatttagaaagaaaaagtgggatgaaacaaatattaaggcaaggggattgtttattaatactgagagcaatgaaattgtaagcagaagctatgataagttctttaacattggggaacggtctgaaacaagaatgcatcatctcgtggatacaatgaagtttccagtaacagtcttcgataaggcgaatggatatttaggaactgtagggtatgactctttgtcagatcagttggtattcacttctaaatcctttacgtctcaattaacaagtgaacatgcaaaatgggttgaagatatgtttttcaagtcctttgatgaatttaaagtaaatatcattaaagattatctgaagctaaataatgtttcattcgtttttgaagtaacacttccagaaaaagatccgcatatcattgaatacagtaaagacaaactagtcctattagacatcgtaaaaaggcaaatgacgtatgaaaaactcccttatagtgaagtgaaggcagttgcagagagtctttccattgagtgcaaaaatcaagttgcagagtttagtaactggacagatttctatagatggtatctggacgtgtcacaagacttttcaattgaggaagagggttatgtaattgaagatgatgccggcttcatgacaaaacttaagctcccttactataacttttggaaacaaatgaggggattaaagcataagatcagcaacaaacatgagcatacggttaatacaggaagcctttacactcctttgcataatagattttttgcatgggctaagacaaaggacagaggatatctaaagtcaacctccattatcaagttgagaaatgattttgaaaaagaaactgtggtaatggaatccagatgaattcaagataaaagtaaaattttaaagagaaaggttgatgggaagatgaaatttgcaccaatggataaagttaaatttaaaacagctagccatttcaacaaacttcgaacatttaaaaaaagagttcctgaatttgacgatcctttactcggtgattgctgggaatttgaagaagatgggttaaaacaatttgattgggaggagaattacgaatttgtcgctaggcccaaacattttaattgggattaaaaataggatctaattgagtttttaatgaaaaggagctgttataaagtgaaagatatccgagttgtttatgacagaaacaaaactttagaagcggtcgttgtccagtttggagctatatgtgtgagctagtagaatcgcaattaattgatgaagaaactaaagaattcgacgtacttaatgatgaatatcaaggaatttggaaatatgaaaaagggcaacactgcgaagtcgaaatttatgatggggtagacaagtgggtttgtcaagcattattaaactgaataaaaagtaaaatgttcttcagatgatataaaggaggggaaataaagatgagggaatcacaattaagggaagaaaatgaaaatttgaaaaggcaagtagatcatatgaaagaagtctataaagaaaatatgcatcttcatatggcagtaagacaaggtgaacagttaaaagctaacctacaagcttatttacgacaagatgaccgagtatatagtccccatttcattacaccaaaacaaaaacaatatatcgcaaatttgttcaaaaaacatggcttgtctccactcagtaaagcaaaacgaaaaatagttaggcgttttaatgggggcggtctgctttcagagcacgaagcacatcaaattatacaaatgtatgaaagaaagtaatgttaatcttgacttggctggttcaactgtaaacaagaaggaaagagatttttaattgtagttatacagtcacaataaaaagactgttttaaagaaagggtgagaaccgatagtcactttcaaaaaacttagtgatcctgaatatattaagcagatggaaattgaaagaaatgaacgtgagcggatatatcaaaaaaaggagactttaagaaagaaaacggtgtgcttcactggtcataggccgaacaaattgggtggatacgatatgaaaaatccaacaatgcttaaactcaaagataagctgcttgaagtaattgaagaattaatcactaaggaaaacaagtccagtttcataactggtggagtgttaggaactgatcaggctgcttgctggtgtgtacatattctaaagaagaaatacccacatattaaaaacataattgcaacacctttcaaagaacaagataaagtgtggtctgaagaacaaaaaatgtggtacaaacgtatgcttgatgtggcagatgagattattaatgttgaagaattagataaatataaagttagtggagctgtaccaggtgagttttcaccggctaaaatgcaaaaacgaaatgaatacatgattgatcacagtgaagcaatagtagctgtttatgacggaagtataagtgggacaaggaactgtctgaattacgctaggaaaacatacttaggacatcaaatttggaggctgcatccgaaatgtgattttgaattggatataagctatacgcctgaatgaggagggatataacatgagtgaatttaaaattgtgaatttagatggagttaattggggatcgcataatgacgacacgttagatttcaaagaattgattacaggaggaacgattgcagtaggcgacgttgttaaagttgaaggacggggcgattgcccacttcctctaagggagaaccaactttgcataacatttaacaaagaaaatgagttgtttcttgaagaaccattcacccaagaagaatgcaaatcattattcggatcagattttagctactaagcaattactttaaaaggattatttcaatgaaatgaggtgggaatttgagtgagaactataaagatccgagacaagttgcgcttgagcttgtaaagaaagcaagtgatcagattcgctataccaatgatgatgaatttacatttgaagtggttgataaattggaggaaattgaggatatgcttaagaaagatattgataaagaaaagaagaattcattgaaaaattagttgaaaggatgtcgttagcataggatacatcaaatacataattgatacagcctggtttaacttagtttggtttaagtggcatcttggagcggatataagcatatttgatggctgcggatggaatacatataaatatttaaagggtaaaaataaaataagtggaggttataaagatgataaagaggaatctgcttagcaaccacgttgatgagattattggtgaatattacgctgctaaaggatattcagtccatagcattgaccgccaggaaaatggacaactgatcgttgttacagagcgagtagcagaggagaaggaaccggcacaagtcgatattgcgtttgattttgtacatagaagaccacataagaagaagtatttagcttaaaaacggcaaagagtcaaagctctttaccatcaggtgatttctttaaccgattcgcaatgtacttcattacgtttactgcaatcgacactaatgcaataatcaatgctatttcaaataagaggatgtatccaaaattcacattaagcttttcaaagtaatcgctggtaatagagaggattttataaatccctagcataaaaacaataaaggaaacacctaaaattacaagtgactttatagaataatctttagtatgttcaaaattatagataattattgatacaaataacaaacccgtagcaatcttttgggttagcgaatcatcggccgaaaatgattgcactactatgctgatgattaatccagcaataccgattgttttattcaaggaatcacccactcgtatgtaagttaggtatgagtttaccaattaaaggggattttctcaaggcaatacacattaaagttaaattaaaatgctttttaagaaaggggtggaaacatgcttggttatcagaaagggcagcaagtaagatggcatgaaaatggggaaatgggaattatattgtgggtgacaaatcaaggctctgtaggtgttaaatggagctcgggtgaatacggtgaatacaattataaagttgatgagttattactgttaacagattagtatcttacccaaaagtgtgaacgcatgacagcaagaaaaaggtttagtctacataaaatcgtgattttaaacagaataggaggaaacgaatgaatcaagatattcagtttttaaaagaacttcagcaagagttgaaaaatcaagacaacgacggacaagctgcaccacgtttctggacagttggtgattatgaatgggtcgaagctcgagaggaaaatgcagaacggtattctgtatacctgccatatattgcagaagcatatgttttagatgattatttggaagatttaaaagaagatagtgagctatctaaggaagcattaacagagttgaaaaatgacgactttgatgatcctattgagtggattcaaaaatacattgatgaagaagcagaattaattccagaaagaaaggttcatattgtacggccggatacaatgtttttgaccaaagaagaagcgaagagccacatcaatttgaacaagcatcactacacttcagaagctcatacttatgcaatgacagcttggagggcaccaaaagtagagcagttgcttaacatacttgaaacgtttgattggaattcaattaaagacagtcaatacaatctataaggggtgggaaaatgaatacatatgtagttacaaaagaaactgaaaattatctatatgaaataaataaacaaattgtttatgccggtaataataaagatgctgcctttggtcataaacctgaaacaagtgagagcagactaattttagacgtctggtttaatggcctaattgttaaatcattcagcagaaatcctaatggaaactggcgcgttttatttgataaaatggcaatcgcgaagaaagaagttgaagactacagcagaaaattaaacaaggcacaagagcttgtagagatgatagagagagctgaacaagtctagataaaagataatttttaatcagttattaggaggaaacgaaatgaacgtaaatattaaacggttatcaccggacgcacagattccggcttatgcgcacgcaacggacgccggcttcgatttagtggcgtcagaggacgttattatcgaaccgggctgggcagagcttgtgccgacgggtttggcgttcgagattccggagggatacgaaatgcaaatccgtccgcgatcaggcattacgctgaatactagactgcgtgtgcaactcggaacagttgattcgggctatcgaggagaggtcggagtaatcgtcgacaatataaatcgttatacagatattgaaaaggactttcttttcgatatcagagataaaatcgtcagtgctctcgattacctcggagcttgggatcattttgcgaaaggttcgtacatcatccgaaaaggcgatcgcatcgcgcaagccgttatcaagccggtcgagcaggtggtatttacggaagtcattacgctcggcgatagcgatcagaatacgagtcagttaatttaaagtctgaatcgacgcttttcctcaaagtcttcgggatactcattctgctttgacttggacttgaatacaaaccaaattatagcacctagtgaataatccatgactttatcaaaaatccaagttgtgaagagatccataagaattttcattgcatttcacctcccgagacaaaaatgtcctatctctcttagatggcatgtgtatgacacgcatctattaataaaagagtgaaaagtaatatgaaaatcaaaaaagaattgaaaaaaataaaaaagaggtgaaaaaatgatcaaacaagaacgagaagattatataagcaggcttgatgaatatggattgacagaagaaggggatgagggaatgacgaatattttgaatgattttgtaggctatgacatttggtgattatttatgaataaaaataaaatagttatttatagaagggaagggcgcagatggcaacagcagagcaattgaaacgaatgaacgacataaacgatttgatcaagcttatcgcaagtattgatagatgtactttctactgtaagtcaaagaatcggatagcgtatttcagatttaagaaaaaactgttcttcgttgatgattacacgggcgctgacgtttacccatatgaattgggatacgggcgtgcaaatggtttttcgcatgggggcaacatgtggcaactagtcaacagcttcagaaaattcatcataacagggaaatacggcgagctgagggattataaagaaatatgggcttacagctatgaaggttgtatgaaaatccgtcagaaggcgaaggagatcggtttcattgaaagtgttgattacccctacagctttgctgaatgggcaagttaaactaattgattcatgtactaaattttcatcaaaattaattaactttgagctaaggaattatgtaacggagagattagactctccaggattcaaaggaaggtatgcggagtttaccatgcttagtcttaaatctgtgcttaaccttacataagatcggttctacaaatatatattcgtcagtttcagactttacatgtttcatagagtggaatttacttcgttctgcgttcggcatgaattccattattccggctgcagtaccatcaggataagacagaagaaattttatatcctctttggtgtagccggtgataagcacatctgtgtaatcataattaatcactttcagccagctatgggaacgtttattgatttcataaggggagttagctttctttagtacgattccttcaagatgcttttctttggccagattaaagtaagctaatccgtttccttgtagaccttcgattacaaatacattatcatggtcaaggtttaggtctgaaagcatactcttacgttcagtgagtggcttagtagcgattgaatgaccatcaatataaactacatcgaatacacagtaaaccaccttatgagctgatttcttagacataaagcgttccataacagcttcgaaatctggagcaccgcctggggcagctacaatgatttcaccatctaaaacagttccattgggtatattaagatctaacagttctgggaacttgcttgttacttcgttgttgtgacgagtataaagctttatctgatcattaaacttggagaggatcagtctaattccatcaaacttcagctcggtaatataatcatcgtcatcaaatggttctttgattgaatgcaataacattggcgatacaaacaaaatatcacctcctacttagaacataatagctaagcgaaggtgatatataaagcaaaatgactgtggtacttaatgggattcaatcagttccggtgagttgtttttaggcgagttaactaaggatgaaacttgataagcttccatgtcatcagcatcatacggaagcagtaagctttgaagataatcaggatcggtgtttttggggtttagccattccttttcgttcttgtcagtaagaatgaccggcatccgatcatggatgtcctccatcaactcattgggttttgtagtaatgattgtgcaggtatatagcggattgccttctggcgtattccacttttcatataagccggcaaatgcaaagaggttggatgatttaagtttaatcctcataggaaccttagtctttgggtcaagacgcttccattcataaaaactgtccgcagggatgatgcaacgtttgctaacaagcggttttctgaagcaaagtttctcggccaatgtttcagctcgagcattgatcattttatagccgatcttttcatctttagcccaaggagggataagaccccatcttagcttacccagacggttgtttgatccatcattaatgattgtcaggatgttctgtgaaggagctacattataacttggatggtatgcgtcttcagacaaaaattgatctatattgaactgttcgatgatgtcgtcaaactcagaaaataaagtgaacctgccacacatgttcatcatcctttagggttttttgaatattgtacaggcttgatacacgaaaatcaaaaaggaggaatgtgatgcagcggcaaacagttgaggtaaaagaagttgtagtgttgatcagagggatatggacaaagaagaagttcacggatattgaaaaggggcaaacctttaagattgtggagaatggaagagtaaagaaatacatagcaagaacagatccttattgggatgagatgtacgaagcctacataattgatttatttgataaaaataaaataagtggatgtgagaataatggcgatcaatttaaagattagaaagaacaaagcagataagccaaaggtgaaagatttagaggacgggtacttcattaaaatagatgatgctgatgtatacattgttagaacactagacagagagtatgccgctaaagataaacatgaagttattcttatcgatctgagcaccttgcaaatagcgccatacaaggatatgaaggaattaaaaagtaggctgtctaacagaggtagcacagttgaagttatcagacctaaacaagcaaacgttaatatcggttttgagtggagacaataaaaggaggtggagagaatgagagatattaaatttcaggcgttggtagttaaacatacattaagcaatttgggttctaatatgcattgggcaggtatagacagttacgaagaaattattgatgttcatgacatttcttttgataacggaaaaatagattacgttacagataaagacggtgatgaattttcgtttgctgataaaagtttgaaatcggttcgacaatacaccggattgaaggacaataacggcaaggagatttatgaaggggatataattcggattactttcgacaccacatgggctgaagaaccttattacgttggagaagttaaattcttggatagcgaaaactatccagcatttgatttaaggccttggattgattgtgagatgaatgctttgagttggttaaaaagcgaatcagacccgactgtcatcagttatgaagtaatcggtaatatttacgaagatactgagcttttcgaatctaaataaaacagagattttataaggataaaaataaaattaaaaaggggaaatttgatgaagctaattggtattaaaacaagtaactgttttttggtgtctgacaatattgaaggaaagaaatattttcatagtcaattagatgaattgtttttcgatgggaaacgagcaactgaaacgtataaatcagactggtttaagcttgataaggagccaagtgttattgaaaaacaaatgcctgctaaaaaaatcaatcataggtatgaattaaaagaggggttccaggaaactgatttgacgccacaagtaattaaaacttcttacataggtgaagacagtgaatactatgaagtgaagggtctatataatttaaaatttgaagaagtcccgcaacagaatcaaaaaattgagtttgaaatgaatgtaattgaagaaattgacggagaacttaagttgcaaagccataattttaacttgaattataacttactggatagaattcaaactcatccaatgcttcttgaaacaaagccgtgttacttgtcccgagaagaaagctataagattatcagaaaccatataaaagccaatataaaccctaagtttgcaagaatcacgagtgattatgatttctgtttaactgtggtcaaagttttggagctttgcaaacctcaagagtacgtagttgatctaaatacaatgtacaaacgtagaaagcctaaacttgagaaaagatttcaaacaaagcgggaagttgaaatttacaatgttgcacctaaagcctatcagagctacccaattgtagaaccgtttagtggcaaagatgttgaggatttaaagggcaatattaagaaatttctagatgatctaatggataaaattaatgagcctttagtcgaatgtaaatgctgcgaaggaagaggggttatcttaagtgaaaattaaattggacaaagattacatggtaaatgaattgcggctgcctgaatcctcaattttagaagaaatcactgatacgtctaggtggagtattcattatcgtattgtgtttgcatatcaagacaagttttatgagacaacttacagggaaggcgctacagagttacaagaggagagaccatgggaatacgatgaccaggttgagtgttttgaagttgagcttaaggaagttaaggttagaaaatgggtaagaaaagaatctaaataataaatggaggcggaagaatgagagaaatcaagtttcgaggaatgggcatcaacggagaatggtattacggcaatttatcaatcattaagcaaagaatcaagagtatgggtattgatcctggttcttatatctctaataaagctggtgttccatttgcttacagtgtcaggccggaaacagttgggcaatacaccggattaaaagacaaaaacggccgagagatttatgagggggatattttaaaaagaacagtcacggttgtcatgtacggttcaggcaaaccacctaaagatattgatgaatacttagaagttgagtatcgggaagattatgcgggcttctatatcggagaaaggccactgtttgcttatgtggacaatactcgtgatgtcgatactggctgcagatgcagcaaagcagaagtcatcggcaacatttacgaagatcctgagcttatagagtctaaataaaaacgatatttaaccagatagggagatgtttaaatgacttcagaagaagcaagaaattattttgtgcaaaagggacttagttatgaagacattacggagggagatatttgtgctttagttatgctactcaataagcatgttaaacaggcagttaaagcacatacaatgtctgttgatacaatgagaatgagtcagaaaataaaaagcaaatacaaaacaaatggaactttaaaaagttgttatctttacataaacagtcactattttactcaaagagaagcaattagttttaatccagatggttttattggtttcgcagggtgggcagattcaggcaatagacaacctataattagtgcttttactgaatgggttgattatatgagtgaacagttaagacaaatcagttaaaagtaattttttatttaagggggtgataacgatgtgatcgatttatatgatttgagttttaaaaataaaacaaaaataaaaaggagtggttattaattgttgaggattaaaaacaaaatagaggaattgctaaaaaagactaaaggagcagaaaagagagactttggacggtacactctaatctgcacacttcgcaaggttacgaagctattaaagtatatcacagaaaagaagtcttttccagtattggtgacagcattggtttcgttcatgaatccaatcagtatcttagcagcggacaagtatcggaactttgaagagcttaaagcgaatgaatcaccgttcaattttagcgtgttctcaaaagagcaagacactgatgtattaattcttgctccccatggaggtggcatagaagggggaacaagcgagcttgcaaaggaattaagcgaaacatactctacatatctttttgaagctttaaagacaccaggagcctttgatttgcatttaaccagtacgaattttgatgaaccacaagcacttgaaatgttgaaggggcatgagttcacattgtcacttcacggttatgcaagtaatgatcaacatgttctagttggcggcacagaccgggacaaagctgaagcgataacaagtacattaaataatgccggctactctgcagagcttctagatgagggtacgaggctatccggtagcagtccaaataacgtggccaataaaaataaaacaggaaagagcattcaactggaattgagcactggactacgcaaatcaatgttcaacaccttttctctgaaaggacgctctggtacaagaaatgagactttttataacttcattgacactctatcagggtttctcaatgaaaatgtagaagggaagggtttgacaacatgaacatgcaacagcccttatactattttgttgatgctctggattggggaattgatgataaagggtcaaatgcaattgaaacaacagaaggattaaaccgagctttagagtatgcatgctcaaaatcattctataaagtatatgttccaaaaggtatctacctaattgatgcagtgaatacgtcaaagcggttacctgaattcggtggaggtatcaatgttccttcgaatattgagctaatacttcatccagaggctatatttaaagtgcagccaaatgattatcagggttactcctgtttttatatcggccaagcaagtaatgttacgattcgtggcggtcaaattattggggatcgacatgagcatgattattcaaaaattacctcaattaagaagacgcatgaatggggctttggtatccatgttaatggaagtagcaatgtgctaattgaaaatgtacaagtttctgactgtattggagacaacatttggatagcggctgatggaatgatgaacacttcaggaacatatacgccttcaaagaatgtaaccgttcgaaagtgtacgcttttaagaggaagaagaaataatctggctaccaatggttgtgaaggtcttcttgtcgatgactgtgatatagaggaagctggaggagatacaattgggccacaattaggaattgatttagagggctttggagaaaacggaattaaatacgatcacccgtataaattaactgtgcgaaactgcagatttaaaaacaatggacgtggatctgttacagctcacacaagcggcaaggtaattattgaaggaaactacagcgaccatgttatttcctatggatatagcacggatgtcagtatcaaaaataacaagatcatcaatgaaaatgaaattaagacttatggaattgactcggtaggtgtttcaagtactgagtctggaaacagagttcaaattgatggcaatacgattagtggctttgaagtgggcatttgtgtaagaggaaagggtggcacagtatcaaataatacttttgaaaaaataaaagcatgccctattgcaacacatcaagcagaggactttttaattacggacaacaggatagaaaacagtgattgtgttcaagtccaggttagaaactcaaatgatattaaggttgtgaataccaaaggaaaaggaacgagctcgtcttatgctgcaaagataatggactctacccgaatcagtctcgttaataatgagtttgctaatgtatatggtggaatttattgcgaaaggtctcagtcagttcgtttaaagggaaatgacttgttgttaagtgggagtggatacggcatcttttgggataaagactcttctgtctcactgcatcgaaatgaaattcatgagcctaggaatgttgcaattaaaggcacccctgagaaatacagttgccagattagtgagaatcaggtttatttctgtaaatcattaatcgccatccaactgactggtggttcagaacatatattaaaggataatgagatcatgttcaatcgttcagcagaccaaggatatggtgtttatttggagaatacaaacaaggtacgtctcgtaagaaacgatgtgcgcggaattggtggcaagttattatcccacccatattgcacagataaagcaaagaatacaaccttaatttataacacatatgacagtggaacactgaagactgcagaaggagatattgtggtctaaataaaactgtagttttaacaagtttaggagatggatatatggccaatattttaaccaaagaacaagatgaagcaatccggtatttcaagaacaagctgaacatatctgaaaaactgtacatatccctgattaattttaatctgcttagagataaacacgaagactttggtaatagactatatgagctttataagacagacccttatctgtatatcagagcgcttaaagaaggttatgtggttgatcagccaattgaatttaatgaagcaattgtgcggttctatgatggtgaagaacttgctgtgatccataagactactgggaagagatacaatgtgaatgttaaaatgaaaaagcttcctgatgggtttacgctgcaaacaatgaacatgtggtcttggagtgaggttatttgattattcaaactcctttgtaaatggtataattgaattaataaaggagtggtattatgtccatcaattctattggaggctgagtcatgggagttagagtgggaggctaataagataaacattttgagttgctatttaagcggctcttcttttatgaggtattctaaaaaatatcgtcgataaaggagaaactgatgaatttcttaacagcaaaaaacgagtacggtgaaacggtttactttaaaactcttaatagaaggcctcgattgggtgattttgtgaaaccaatcgatacacgacctgtagacattgatggcaatagaattaaagaaagtggcaatagcgcaaataaatatgatgatctagatatcaactctttttatgaagtatacaggatatttaatgttaagcatgtaatcattaaagataaactcggtcataaagttcaattagattcaagtcaataccaattagcaaagaaaatcactaaagaggaatatacgaattttaatgaaaaacttcatttattaaaacatattgataacaaccttaaaaggattagcaacttttccagctaaataaaagcactttgtcgagctgcagatagtagctcaactctttttaaaacttttgagaataaaaataaaatagttattgaccgatccgttttggtgatgtaagattaagttatcccaaagagagaaaggaggaaagagatgaaaaaggaattaaagatactgaaagtatctgtcgaagccttacatacctacaaaaatgatgtcaaaaggaattacgacattgacgaagaccaagcaagaagaaagttaaccaggaatgtgatgttggtaaaggaatttaaaccaagaggaattaaaagaggtcttttttctaaaacatactcatatggaaacttaaagatcacaattcgacatggaacagtaataaggattgaaaatgtaaaaggtgatcctgaaccttgggactttccaaaaaagagatacatagaattaaacaagctacttggtatcaaggattgtaagtttagtagcaagtctcattataggcattttaagaataaaaataaaatataatattaacggaggcgttatattgagcaaactttataatacatttgaatttatcggtaacctatttatttcaaacaataaagagaaattccatgaaattaaggaatatgacagcggatgggttaaggaaagattaagcttcgcagttcaagagtcaaaaacaaacagtgtttttgttgagattgaaggtggttactcaaaaagcaaacaaaataaagtgttttcattcagcaagggtacagaaaatgaaaaaggatcaagactcgaaattccatgggaagatcggttgaaagaagaaacagtaaacatggttgctgatttttctaagatcctaattaacttaaacgatgagtcaacaaaaaccaaattaaatgaattgaagtttaaaattagagggttggaaatgaaagactctcttactgaagaagaaaataaaactttatctactctcaagggagaatataaacaattaaacataaacggtgcagaattcattcatgaatacgatgctattcagtacttatcccaaaatctcgaaaagcataaagacaataaatttaaaattacaggtaatattgaatacaattcatggaatggacggaattttagaaagttcaaaatcaaaaccattgaaattgtaagtagtgatacaccatctcaactaagagccacaatggatgtatttttcacaagtgaatctttagatgaatcgtcatttgaagaagaaaaaaggtactttgttgatgcatatgtgcttagctatgataatcaggcaaaaaaagatcgattttttcctcagcaattagtcattaatgcacaaaaattggactttgaaaatgatttacatatgaaacgattaaatctcttgaaaaacttctttaaagttgaaaatgatgaagtatatcaccttcaatgggttgtgaatattttcaggggtgctgatgagattgagtttaccgaagaggaactcacggaaagtcaaaaggaaatgattgctttaggtttaaacacactagatgactttaaacctaaaggagggctattgggcgaaaatcgtgaagaaaatagacttttaaaacctattttaaaaaagattaatgattctaatgattttacagaaggtgctgcaacatctacatatgaaattgaagatcttacatatattccacaacagattcaaaattctacaccacccgtagaaaaagaagaacctaaagtgactgaagaagaaaaagataatgcatttgatgatttatttgcttgatttgaaaagacctaactgacatttatttaaaaacaataaggagatgtttatccatatggcaagaaaatttggtaaaaagaataaaattaaagttaatcctctcgattataacactggaattattggtgaatcggggatcggtaaaacaactttagctaaagaagtttgcgaagaattagtcggagcagatgggtatataatcttgaatattggtaaagaggatggcatcgatgccatcccaaatgcctcctatgaagatgttcctgattggacaacctttaatgaaattactaaagatattattaaaaacagaacaacagattatgcagatttaaaggttttagtatatgacacatttgatgagttaattaaaattacagaaccagaagttattcgactacataataaagctaatcctgaaaaaagagtgaatacaattaaagcagcgtttggtggtttccaggcaggagaagacaaagttattgagttaattcttgagaagatgtgggaacttaaaaaggtcggtattagcatgtttattttaggtcatacgaagaaaagaacaatgacagacgtagttacgggtttggaatacgacatgctgacaaccaatatgacacataaatacttcaatgcgattaaaaccaagctgcacgttttaggagtagcatctattaatcggtcgattgaaaagaaaacagtaaaacaaaaaattgggcctgacaaaacagtgggaacagttgttgatgaatcaagaatcatcacttttagagatgacaactttaatattgattcaaagtcaagattctccgatatcacaccatcaattccattagatccgaatgaatttattaaagcaattgaacaagctatccatgtggcttttgataaacaaaaaaataatacaaataacattgaagaagaaagaaaagaacaagagcaaattaaagaaattcaaattcacaacgaagttaacaactcatcttttattgataaagaagagaatgagaggttggccgaagagattaagacactattccctaatgcaactgccgaagctaagggtgaaatgaagaaaattatggatcaatttaatatgaaagattttaaaggtgtagacattgtaccaactacagcattcgagaagatagtcgaagcattatctaactgaaggaaaagaggggggagtctcccccttatcaataggagagggtattcttggccagaagatgtgtatgtcaaatatgtaaagctaatggaactgttgatacttttttcagggtttctgatgataaggggaaaaataaatactactgtactaaggatgaatatgaaacctatatcaatgataaggtgaaacgaaaaaacctcttaaactacatagcgaaagatgtcttgaattatagagagggtcaagtcattcctccaatttttctaaaaaagatagctgaactaaaaagattttatgattatgaagtgatacaaatttgctttgagaagaaccaacaaacaattcaatattggttaactaataaagagttttacaacgagtatgggatgattagctatatttttaagattgttgaaagtaacatcaatgatgtttataaggaatggctgcatgaacaaaatcagagaatgattgaaaaaaatcataatcttgatattgcaattgtaaatcaaactaatatcgttgattccacatctttaaaacaaaacaattcaccaaaaaatataacagagtttctggatggggaggacgagtattgaacaacttagattcttatccaaaggaattagttgaaaacaggggacaaattgaaggaagctttatattttgtttatggaaaaaccctgatttgtatgaggattataaagaccacgtgagggcggatagagattttctaacagaagacgggaaattttattactctctaggtttagaactgagcaacatgaattataagagctttgatgatgcgagtgttttcagctacatagaaggtaaagaaacattaaaaaatggttttattcggcgaggtggaatgaaaaccattgatgaactcaagcacgtactaaacgatgaaaatgttgagacatactatgatgaactaattaaatttaacatgatactaaagcttcatgataagggattcaatgtttcgaacgagcttgataaattcaagaagatgacgagtcaacaattgtacagttactttgaatttcaattagataatgtttttctaggtcgcggttcaggagtgaaaattgaggatcttgatttgaatgaagagtttgtcgaatcaattgaaaacggggaagaaatgggattaagctattcagctgcatgtccattattgaattatcacacgcttggacttcataaatctaatgttcaaatttttgctggatttagtgggacagggaaaacaagtttttgtgtttcttcttatatcatgtcaattttagatcagggtgaaaaggtaacaattatcgccaatgaaatgaataaaagggcttggcaacatatttttatggcaacaattttaagtcataaacttggttattatggtttgccaagaaagaaacaaaaaatgggcaacctaaagcatgagcaaaaggaaatgttacaaaaggcaattgaatattatgagaagcattacaaggggcgtatcaaatttgccaagatatatgattacagcattaatgatgtaaagagaataatgagaagaatggcaaaacaaggcttcggttatatgctttacgatacatttaaagctgaagatgcggcttcaaccaatgtaacaggtgagctaattgaagcctcaaaacagttattgcaagttgcggaaaaagaggatatttgcatcatcattacaatgcagttggccatttatatggagaatacgagatatctaacagcgtcttgtttatcaaatgccaaagcagttaaggagattgtttcagagttagttctaacaagacctttatgggaggatgaattcccaggaggaaaattcgatgttaaaccctatagattcaaaaaagactcgtcgggaaaatttacaaacattaaagaagaaattcagttagacccaaataagaagtatagattattctttttgaataagacacggaatgacgaaggcgatacagtgttgttataccaatttgacggtgcatggaataaatggaatgagctcggttattgtactcctaaacatcagagaactacagagcggacatgattaccaagggacggtgaaatcatggacgtatatgatcttaagaatcacattattgaaaagccagagtacatagtacttattttagaacagacggggttttacaatgttgatgaacgcgggaatgagtacagatgtgcgagaaaaaaaggaagaaatccgacttcagtaaaagtaaataaaaccactttaggtgcaacctgtttttcaaccaacttaaaaggtgacttgataacacttgttcaaaataaattgggtttatcttttcccaaaacaatcaaaaggatatctgaaatagttgattataaaagtgaagaagaatataaaccacctgagttaccattcggaggtttttataagaatataagaagactaagtaatccaatggatttggatctagaaacgtattccgatgacattttagatcaatttgtatctgttccaaataagttgttttatgaggatggaatattacctttaactcaatctttgttccaggttggttacgatagtgtttccggaagaataacggtgccatggaaatctcttagtggtgaattgtgtggtgtaatggggcgtcttaataagaaggaagttaatgatgaggaaacaaaatggctgcctattatttcatttcccaagtccaaaacgctatacgggtttgttgaaaattacagttcaattagagaaaagagcattgttatgatcggggaatccgaaaaacattcaatggccttagcaagtaagggattgaatgttggagtttctttaggaggcagctttttaagtgaaattcaagcaaatcacataaaatcaatgtttccgaaaaagtcattagtcatgatggatgaaggattaggtgaagaacatagcgtagaaattgccaacagcctaaagtttgaaaatttctttgaaaatgaagttgggtacatatttgatcgtgaaaacaagtatctgcctaagggatcaaaaatggcaccagcagaccttgataaaagcactctacaccgtctaatcagagactgtacagtttggatatgaaaaggagatgattgattgaaagaaacattaaatgaattgagacaacaagggaaaaacatttattccttttcaaagcttggaacctttaataactgtgaatatgaatactacaatacatacgttttgaaaaagaaaggcatagataatatttacacccttatgggttctgaattacataacggaattgaacagatttataaaaatgaattagacattggtgaatttaaaaagggatttgaaaatagattaattgaattagagctgaatggagtcaactttccgagtgactcaatcggagacagctggaaagcagacattggtcatttcctaaacaattttaataaaattgacagcaaaatggttttagagaagctgcttgtatttgaaatatcagatgggatttatcttcaaggatatgtagatgcaatccttcccagtgaaaaaggaaaaccatacgttagtatttatgactggaagacatcaagtaagtttgccggcaagaaattaaatgaagcaggaagacagctattgatgtacaagcttgcattggagcaaacaactgacttaaaagtagataaaatactatggttcatggtgaaatacgtttatgtatgtacccaaggaaaaaccaaagtgaaaaagaaaatgtgtaacagaggtaagtgggtaaaggaaatacgaatgaaactagaaaaagagatgcgcactttggagtatgatgatttcgaaattgacctattgttagataacgcagtaaaagaaaatagcattgactgcttacctgccgagattagaaataagtattggcttgaagattgtttagttgaatacgaagttactgaagagaaaattaatgaactgaaagattatattactggtactgttaaaaagattgaaaataaagaccgtgaagatgaaacccaatgggaaccagtgaaaatagataaatacaattccttttattgcagtgtcttatgtggtcaccgaaaaacatgcaagttttataaggattttttaaataaatcatcaaataaatttaagaaaaaggataagaccgatttgtttgataacctattttcttagggggtaatgatgaggaagatattctatgactttgaagtttttaaacataactggatggttgtgctgatcgattatgatactaaaaagggtaaggttattgtagatgatgttgatgaactgaaacgattctataagatgtttaaagatgatatttggattggttacaactctagaatgtacgaccaatacattttaaagggaatcctgttaggaatgaatccttattatattagttcaagaattattaatgataatgtaaagggatttaatgttgttagagaaggttataagatcccactgaataactttgacataacaactggtttccacagcttaaagcagctagaaggctttatgggttcaaggattaaggagtcatcagtaccatttgatatcgcaagagcattaacagaaaaagaaattaaggaagttgttgagtactgtattcacgatgtgaaacaaacaattgaagtgtttgataataaaaaagaggaattcgaaagtcaattggctttaattgaagcctttgatttagaaatgtctatgtttacaaagacaaaagcccaattatctgcatttatcttgggggctgaaaagcaaggaaacaggggagatgagtttgaacttagatttcctaatacattaaaaattgaaaaatacaaacacattgttgattggtatagaaatcctgaaaatctagattataaaaaaaacttaaaggttgatgttgcaggtgtacctcatatttttgcctggggaggtttacatggggcattaccaaagtataaagatgaagggataattttatgttgtgatgttgcatctctatatccttcaatcatgattgaatatgattacatcagtcgtaacgtgaaaaaccctttgaaatatactgaaatcagagatacacggttagaattaaaacgcaaaaaagatcctaagcaggctccctacaagatcgtcctaaactcaacgtatggagcaatgaaagatcagtataatccactttatgacccgttaatggccaataacgtatgtttagccgggcagctgttgttattagatttgatcgagaaaattgaaccgtattgtaaactgattcagtcaaatactgatgggttgtttatgaaagttgagaaagaatctgatattgatttaattaaggaagtggcgaaggagtgggaaaccagaacacgattagatttagagtgggatgtttatgagaagatttatcagaaggatgtaaacaactatataatcattgataaagaccagaagtataaatctaaaggtgcttatgttaaaaaactaaacaacctggattatgacttaccaattgttaataaagctatgattgagtattttacaaaagatattccagttgaaaaaaccatcaatgaatgtgatcagttaagagaatttcaaaagatatcaaaggtttcaaacaaatatatgtacgctctctatggagaagaaaggctacctgaaaaagttttaagagtttttgcttctaatgatgaagatgctaaaggtgttttcaaggttaaaacagaagaacgaattgaaaaaatcggaaatactccaccgcgctgctttataaataatgataacgttattgatttaaaagttcctgattatcttgataaggaatattacatagagatagccaaaaaacgaataaatgattatttaggaatatcgaatagaaagaaaacaaagaaggagaagtgatatgcatcgccattaagagtaaaaataaaattaaaacacacattttcaagtctgtttatggtatgatgattttgattcccttaaccactttttcttacataagttatgagcaacatttacataaaacagagggaaatgaagactcaataaaagaatcattttataagaagcctagacagattaggataccatcaagtgagaatattgtcttacggctatttaaaaaagctcaaactaacaaagaacagcaattaaaaaggcatacagagaagattatctcagcaaaactcattaaacctaagcaaagtaaaaaaaggcacaggaagggaggtgagacggtaaagcataaactttttaagagtaaaaataaaattagtattaaagaaaaagaaaacaagccaccggccgcaaagaaaaccatccaggttaagctgagtgcttatattgcccactgccaagaaggatgcacaggaacaactagaacaggtgttgatgtcactcaatcaatctattacaaagggtatcgtgttattgcaaccgaccctagtgttattcccttgaattcaatagttgaagtaagcattggtgggaaaaagttcaaagcaattgcaattgatactggaggagcaattgttggaaataaagtggacttgcttgtagcaaccgagcgtgacgcaattaattttggcaagcaaaaggggacaatctcaattattagttaggaggcgattaattgccgaagttttggtcttatccagaagggttaaaagtcatcataaatgagaatgcaaagaacgcttgtcctcatcatgttggacgggaagggaaaattattgagctgctacactctgccacatatgattacgcagtcagtgatgaaacaggtgatattacattcttcaaggagcatgaattaaatccagctaaaggaggttgattgtatgtttaaaaagggagagaaggtgattgctggtttcacaggagagattggtgttgttgcacaagttgataaaggacatgagcaattagaagttgagtatccagacggctcatatagagtgattggcttcagcaatgtaagaagggtggaagataaatgacgatgattattttagaaggcactgactgctgctacaaatcaacagtagcagataagctaagcaaagaactcggatatccggtaataaaaggatccagctttgaattagctaagagcggtaatgagaagctgtttgaacactttagcaagctggctgatgaggacaatgtaattattgaccgatacatatattcaaatttagtttatgcgaagaagttcaaggattactcaatcttaacggaagagcaacaaagggtcatcgaggagaagattagggataaagccaaggtgatctacttacatgctgatccgaaagttattaagcagcgtttacttgaacgtggtgacgaatacataaatgatcgtgatattgagccggtattaggattatacagagaagtaatgagcgatgttgggttacatacatattcatgggatacagaacagtggtctagcgaagaaattgctaaaggcataatctttttaacggatggggtgatttatgaagaaagtaattgcaattgacatggatcaagttttagccgatttactaagtgattgggtagcctacattaacacctatgatgatccttttctaaaagaggaagatatactgtgctgggatattagcaaatattcaaatacccaaaacaatgtttacaggcatttggattacgaattattcagaaatctggatgttatagaaggaagtcagagagcagttaaggagctggcgaagaaatatgaagtatatgttgttactacagcaacaaaccatccagaatcccttaaagcaaagttagaatggctcacagagcattttccatatattccacatagtaatgttgtgctttgtggcaataaaaacataattaaagcagacatcatgattgatgacggagtgcataacttagaaacatttgatggaatgaagatactatttgatgcaccgcataacaggaatgacaatagatttattcgtgttatgaattgggaggagattgaacggaaattactttaaaatatcattatatttagagtgaaaataaagttaaaaggagtgaattaacactccttagtaaactaacgtgcttctactgtaattttataaatcacataattgtcgttaatgtcatacgcgtaaaccaatgctgtgcccaaagttgaatgagaggatacgacaccactggaactaatgcttataaggttgcttccagatacaatttcccatcgggtgtagccttttaatagagatacgttagaattcctcagcatgtgaaaatcaactgtaccaagcggatcacctagctgcttaacttgatcaattgatttgacaggggttaaagcagaagcctgtgatgtgaatgcagggagtgctagtgctgtaagcaatagagcagaaacaatcaatcctttgtaaaactttttcataagaattacctcctaggttttgattgtgattacatctccagtctagcatgttaaatatttgaaatgtgtgaagtgtttgtgaaactgtttaaaatatctcttttaaagagaaaggggagactgtaatgggttatagacattatatgtataaaatcagcaaggaacttgtaaacgaaataaaatcaatgaattacaatgaattgtccaaaaagttcggtgcaataggagaagaaggttatttctatataggtaacctgcctaaagaggaaatttgggagtttgggaagttgtattgggatgatacagccgaccgcatttattcaaagggacaccctctctttgaaagagaagaagttatgaatgaattatcggattatgttccatatattgttggtaaagaagggcttgaagaagctattgaaatttataaaaacaaagtcattgcaatgtacgagaacttgcttattgatgataaaaatggaactgcttcagtaaaacaagagcagcatattaagaacaacttatctgagtggactagaggatgggcgttaaatacggatattaatgattcatggctaacatcttcttggaaatatgaatacagtatttttgagctggtcagattattaaaaaccatagattttgagaaagagacaatattattttacggttggtgatctaaataaaagatcaattttatcgaaatgagggtgtgaaatggaagttagatggttagttatttttaatgattgtaaaaccggcagttctttgagtgagcttacatatagtaaggatggggaaggaaaccacctaagattagagtcaatggtgcctcgtacaggtgactatattgtaggaggagatctgtcatcagatataaatgataagaggtgctttattgtgaaaaatgtcttctggaatctagataggagagatatagaggtttatctagatgaggttgacaggactgtttttcctttatataaatcgctataaaatttgtcttttaaagagtaaaaataaaatataagaggtggagtctgtagtgaactacccagaaagcttaaaagaggaagccgaaaaaattaaagatgaagtaagaagcggcaaattagacgaggggaaaataaaagccattgctaagtctgcagttgagtttttaagatctcaagaaaagagtcatgctcattgtgcagaagttgctggagcgattgctgcaaacctagatgagttcttcaagtcttatctaaaagaagattaatacaacaagataacaagaaaggataaagggatgtttattgaaaaggtactatgttagatgtaaagatcacaaaggcgaaaacgcgtctttggtaattgaagcaatgtctacagaagaggctaaacggaaggcattagacatacataaggtaaagactgtttataacgtgagcattggggaaggtagggggacaaattgccttcagagaaaacattcgccgtacataaagaatgacaacgggaaagctataatcatattctcgtagaggaggtatcggataattagggatactgccagggatatcattaataatgacgttgatgagattgaggaaatattagataagctttgggtttatttagagaacaatttaaggccagaggataaccgtatatggaagaggtgtgattcggatattttggcagcaacagtaaagctaagaaatttaaaagaaactttttaagaataaaaataaaatagttgttgattgtttgagagaatgcgagtatattagaaatataagaatcgaggtgatgcattggagtgtgttaaatgcaaggatcacattggcgaaatcgtttattacataagaatagctgacaacaaagaatataaggaattcgcggtacataaagaatgcggagaagcaatcaagaaagaatgcattgaaaattgtaaagacatgaaattagaaaagacattggattacttgcagttactttaagagtaaaaataaaatattccttttatcgagaatggagagatgctaaatggataaattgaaagtttgtttacataaaaaaggtgctcatacgttagaaagaactgttaatggaggctggatattagattcaaaaccaattactcaggatcaagcaattaatgaactagttgaagcggttagtgatttaggatattggtgccaagtagcaaaggatgttttagataatgaagactttaatgcagttcaagaggcgtatgaataccatgagtaataatctagtccattataagaagggagaatgaaatgtcatatttggtgctgggactaatcttgttcggttcaatattcataggtaatggacttacaagtttagttgagaataaaaactttaaagaagccttgccattttatctcactgttttcttaatgggagcttgctcgctccttatcggatttattcttacagtgatatgaacaagatgaagggaaatagtgaaaggaaatataaatgatttcctgggaaagcgcagtatgcgacaaattggaacaaatgatgtctttaggtgataaacaaaaaaggagcatagagccatggaaacattagatgcaccaatttatgagattaagcaagaaagcaattggtataaaactgagaagaaacgaagagaagatattaacaaattctttgatgaattcgaagcaacatacggaattaagaatggtttttcgttctatcattccgagtatttcggagtacgcgcaggaacagaagcatatgacttctttaaagatgaagtggtgaaaaaccccacaaaagctggcttctatgcatttaaaaaacgttctaagtatttcacagacataaggtctatgctagagaaaatagaagaggcaaatcctttcaaaggccatgatgtgttcgggagaaataatataactgcaagccagtgggtaggtgatagatggttttttggcgtaagagatgagaaacgtgtagaaggtgaagaagctgtagctattgacttcaaagattatcttaaaattatcttggagaaattaggttaaaattcaatttttataaagaaaggagaaaaacatgagagacattacatccgaattcacattgagaggagtaaacagaaaaactctgaaactcctggcaactaagagtattgattatccagatacatgggtaaaggttcaaattggagatcaaatagcagaagttgaggcaaagcaactgttggtggcaataacggcatttaatgaaatgtgagaaggaagaaactaacatggagaagtgtagagcagtatttaaaggcaagaaaatagaaaagatttaccttttcagggcatatccatcgtgttttcatggcgtccatgcgaaacgaaagccaccagctattgaccacgagtatttagatatatctactgaaactttttatgaggatgaaattaattttgaagttaactgtggtgacactctttacataaatgaacttgatgaaaatgttcatatagaaaaaaaggtcaaaatgcttgatgggggatggatttacttcactgattatgtcattagcacagtcgagaataaggagagtaaaattcaagctgaaaaacaattaagggagtatttagacgaaagtaaagtaaaagaaaagcatgataatcagctaggaaataaaaggatatcattttggcaacatttgaaacatgcttttaagaaagagatgcaacagtaggaggtgaataagtgggacgacataaagcaacatttgaagggaaggtaattaagaaaagttggacattaggcttgtgtgatgcccttgtcccaatcgagcagcaatgtgagtatcagacattttttgaagggaacatcgacttagacccaattgaagtcggagggaaagtgtatatcccagggtttaacgaatacgtagtcgtaacagacaggcaacgcaacacaaaaaatgaatggacatatcagactgacaaggtcattaaaacaattgaggataaagagagccttgaaaaagcaattcaaaaacaagaaaaaatagagaaatggaatcagcaagttaaacaagactatgaacgctttaaagagcaagaaaagaaacgtaaaacttcctggtggaagaggctaatcactaaaaaagactaaaggagagatatttattgaataaggatacaaaagatatttggaacggtttctttatcggatcaggttctctgattgtagtggggttactcatttttgttgaagcagtgactatgtcactagttgtctattatggattgaatcatgtgttaaacccattgcttattgatacatacaacattcaaaatacccatatcactttacctcatgcatttgtgattggtgttttactcaacgtatttgtcaaaggtgtaaaacggtcagatcaggaaaaagatgagaacattttcaagaaagccggtaagtctttacttcattcagcttttgcattgattgttctgtatgtcagtacattgtttatttaacgaaggaggaatctgaatatgattaaatcgcagcaagttaaagtttttagagagacgttacattgtgatgaatgcgaagaagctccagagcttgtgttttcaaatatgatgctcacatcaaacccaccgaaatatccgtttcaatgcccattgtgcatgaaaaaagtttatatgaaaacaacctatccaaaggttagataccaatcagttgattgaagtctaaatgaaagttttattttattgaaaggatgaagaagaatgaaaatgagaaatgtaaaactgtacaaaacgactgaaaacgtttttcttccaaatgaaaaaacattggtagggacttttgatgattgtgaaatgtatgaaggagaaaggagtgtattcttagagattgcaaataaagatgatcttaaaccaagtgactctagtattcatatagaagatcctacgattttagaaatcacaacttgtcaaggcaaaacaaagactattaggacaaggaaaaggttaactgacatttcttctgatttaattaaaattgaattcacagttctgtaggtcgtaataaaaggatgattttagagagaaaaggaggaatagctatggcttatgatgagatcaatgggaaattaattaatcctaaagttagcgatgtaattaaagcgctacaagaccaacttgattttaacggagatacaccaattcaattcagaattgatggtgaagaaacaagcaatgaaattcaattagatccatataaaaatgttcttgtgtttcatttagatgaagtttaaggaggaaagctacaatagacacatttgttttatcggttgtcaggatagacattataaaggcggtttatatatggttattggagaagcagttcacactgaaacagaagaaaagttggttacatatgaaggccaagacggtgttctttggaaaagtgattattgatgggaaagagatcaagagattcacaaaagtaaaataaaaggagaattggctatggggattaaagcagcagtttttgaaataaaagcaacttgttacgctcatgagggatttaataacgaaagtgaatctgttcaaggggctgcgttagaacagctaggaaaggatatcgtagataatttactcgaaaacggtgttgatgatgtaaaaatcaaaggcgattacgttgaggaattgggagttgagaagcccgttatgaagtacttcgaagtgagcgatccctattatgcgttaattaaagcttactcaaaagaaaaggcaatgaagttatatacaaaagaagttgctgatgatgacggggaattaagtgatgagatgactgaagttggacaagtttatgcggcaatacgacaaggaagggttccgggagaaggtgaagagcttatgccatttaagcaggttcttgaagagatttctaatgatgaagaaatggtattactaatcgagggcagtttactttaacggataaaaatacaaggaggtgaattcatctgggaataagtcaaagacagggcaaatatatcatggaatcgattaatgaaacaaattcaattgcagaaataattggtcatgataaagctatcagtgaagtgttgcttctattaagggaaagagtgttgtttcttcaaagtcgatatgattttgaagaagtggaaataagattaaatgagctcatgaagctgtatgaaagtatcaataaacttcaaagaccacgaaaggatgatgaaaatgaataaaaaatacggactttattgcatgggaacacttgttaacacttatgatgacgctattgaggctcataatgatgctgtgtatgctcaagaagaaagtggagtgccgcatgaagtaagagaaatcagaaaaggagagtagataggatggaatacactaagtatggaaatcttgtagaaggctatataacattcaatctttattttgagacatttgaatacaaagaagatagcttattagaacaagtaaaattcaccacagttaaagagttattcaacatgatgcagccagactatgttgaagaactaaagcaagaaaacggtgcagatcaggttgacgttcatgatatcacgtttagcgctaaagaagatgacactgaggctttcatcacaatgtatgacaactcaggaaactatcgaatctcaacaaatcttgatgtaagtggcttggatagcgagtacaagcaaacattaaaaagcattaaaggtattatagataagaaactttgagagtaaagtaaaggatgatgaaaatgaatattagagagtttattgctgagcagagaaaagacgaaaagttcttgggtttgagatcaaaattaagggaactaattgaacacagaagacttgaacttgttgaaatgcttggatataaaatcgatagtttgaatcaagagcaacttatagaattcaaagaaaaattcagtgaattaactgcatttaaagaaaaggtaggtaatgatcctttcagcattagtctggatgaacttggcgaacttctatgtttccaaaaaaaataaggaaggtagatacaaaactctggagtatgttttgagtaaaacgattgatccatacattgataaaccaaaacaggctacagttatttctagataaaatcacagtttcaaaggaaggggaagcaaaatgagtgcagcaagaaagtggagagatttgagaagcaaattaattggatataaggtctacggtaagttcagcgatgttgttattgaccatattctaaatgatatggataagttagacgtaagacatgacaaagataaaaacaaaaaataaagaaaagggagttgtggaatgggagctgctaaacagttatacgttaagcgcagtcactttgtaaccttggatgaagcaaaagaaaatacgcaagtacatatgaagaatggtggttcatacactgctttaaaaggagagctgattgcgactaatcttgaaggggatcaaatggttatcacacaagagcagaaggataactacattccagtaccaatgacagagttatcagattatgaagctcaaatggccaaaggctatgctgaaatgggagacattaatttagaaatgtctgaagcttttcatcatgctgaaaatgaagcagaaacaaccaccaacagtttggttaacggagaatataaagaatattgattattacatatgaaagcaagacaggcaatgtgaaaaggtttgctcaagctttacaaagggagttaaacttcgatgtcattgaaattacagatgacttaatcattgaagaagaatttatacatattacatatacgataggctttggggaagtacctgaaaggactttaaactttattattaagaataaaaataaaataaaaggagttgttgtgagtggtaacaaggtttggggtgataactatggtttagctggggacaagctctcagcaatgttccacgtaccattgttattaaagtttgaactaagcggaacaaaacaagatttgcagaagattaatcgggaggtacaacttattgacaaacacaataccaaagtggattaagctcaataatgagatcatgattcagaaagacggtaagtttcaatttgagaaggataaggaggcagtacacagctactttgttgattacattaatcagaacacagtctttttccatgacttaaaagagaaactggattatctgactaaaaatgattattacgaagaagaattcttaagcgaatacacatttgagcagattaaatcgatttttaagattgcttacagttacaaattcagattcccttctttcatgagtgcctttaagttctacaatgactatgcattgaagacaaacgacaaaacaaagatattggagagatatgaggatcgtgtctcaattgtagctttatattgtgcagatggtgattatgaaaaggctattgaggaagtacacgccatgatgaaacaagagtatcagccggcaacgcctactttccttaatgcaggacgtaagcgaagaggtgaaatggtaagttgcttcctacttgaagtgggagacagtttgaatgacatctctcgtgcaattgacatttcaatgcagctgtctaaattaggcggtggtgtagcattaaacctaagcaaattacgagccaagggtgaagcgattaaagacgtagagaatgcaactaaaggtgtcgtaggtgttatgaagctattggataatgcttttagatatgcagatcagatgggacaaagacaagggtctggagcagcttatctaagcgtattccacccagacatcacagacgtccttgataccaaaaaaatctcagcagatgaagatgtccgagttaaaacactgtctattggtgtagttctccctgataaatttattgaattggcaagagaagataaggatttttacatgttctatcctcactcagtctacaaagaatatgggaagtatcttgatgagatggaaatcaataaaatgtatgatgagcttgttgaaaaccctaaagttagaaaagcaaagggaaatgctcgaaaactgttagagcaattggccattctaagaagcgaatcaggatatccgtatatcatgtttgctgacaatgtaaataaagtgcatccaaatgaacatatttcaaaagtgaagttttctaatttgtgcgttactggagaaacacttcttttaactgagaatggatatgaaaaagcagctgatctttacaaaaagcagaatgagcttaaagtggtcattgataatagaacaaaagattttgcagttggcagcaaaggtacttcaatagtagatgcaattccaatgcaattgactaaaaaagatgcggaaatatttaaagtcaaaacgaagcaaggatatgaaataaggacaactgagtggcacaaattctatgtgaaaagggacggtgaaattcaaaagctccaattgaatcagctaaaaacgggcgataaattattagttcaatcaggtgagggagcatacggcgacattcatgagccagatcttgcttacatcatgggcattatagctggggatggaaccattactgaaaaaactgccaagatttatttatacgataacaaaaaagttcttgagcagaaagttactgatgcagttcaccgtattattcaaaaacacaagctcgatcgtgcttataaacacaatacatcactggctccaacatttaatatggctaatccagaaaaacaagatttactctacatgaatagtacagtcttatttgacatcttgaagaagttcggtatggacaaagaaactaaaacaagagtcccagaattcatttttcaagctaataaggaaacgcaagcagcttatttatcaggtttattccagactgatgggtgtgtaaatgcaaatcataaagccaaagcattaacaattgagttaacatccattcactatgagagccttcaggacgttcagaagctattactaaacatgggtgtttatacaacgatctattctaacaataagcgttcacaagaactccttcctgacgggaaaggtggttctaagctgtacaatgtaaagccaactcacaaaatcagtattcaagatagaaactcaagagagttgtttatgagcattgttgaaatgaaagaatacgatatttataaattcaatttgctaactgagacattgcaaccttcttcaagaaagccaaagcatgattttacggctgaaattattagtattgaagaagatggtgttgaggatgtttatgatacaacacaagaagactatcactctctgattttcaatgggattgttactggcaactgttcagaggtgctccaagcatcacaagtctcagtttatacagattacgatcaggaagacgaaattggtttagatatctcatgtaatcttggatccatgaacattgtaaacgtaatgagcaatcaatcaattgcttccacggttagaatagcaattgactcactaacgactgttacaaggaaaacaaacattgtaaatgccccagctgttgcgagagcaaatacactaatgcgatcaattggtcttgggcagatgaatctacatggttttttagctcaaaataaaattgcttatgaaagtgaagaagctaaggactttgcaaatacatactttatgatggttaacttctactccctgcaacgttcaatggaaattgcaaaagaaacaggggagacgtactacaagtttcacggatcaacttacaaatcaggcgagtattttgataagtacgtgacaattgattatagccctaaatatgaaaaggttaaaagcctgtttggagatcaacatattcctaacattgaagattggatgaagcttaaagaggatgttatgaaatatgggttgtatcattcgtataggcaagctgttgcacctactggaagcatctcatatgttcaatcatctacagccggtgtaatgccgattatggagagaatcgaggaacgtacatacggaaacagtaagacatattatccaatgccaggtttatcggctcagaattggttcttttataaggaagcatacgacatggatatgtttaaggtagttgatcttattgccactattcagcagcacgtcgatcaagggatttcatttacgctgttcttgaaagatacgatgacaacgcgcgatctgaaccggattgatttatacgcgcatcatcgtggcattaaaacgttgtattatgcgcggacgaaagataccggccaggattcgtgcttgagttgcgtagtttaaacgaaggggaggcggagtcgtgaagttagaaatcggtcaagagtgggtcagtgaaaagcacccacatgaaaactttaggatctacggaggagtagtggatacttgtgcagactcatttaaggacgaaagcataacattcgatgagcagccggaatgggctaaaattttcttctgggagcgggcggattatgcgagtttcgataaatacgtcgaatcaaagctaggaaggaatcgagatagtacgtatcctttcgctagatgtggagagacgaagaagtccggattagtagcaaaaatcaaaaaattcaatatggtcgttaaagagaaggaggatgaataattgacgcaatatacagcagcaaactggtcaaagcatgaagatgatttcacccaaatgttttacaaccaaaacgtaaagcagttttggcttccggaagagatcgcattaaacggcgatcttcttacttggaagtatttgggtaaaaatgagcaggatacgtacatgaaggtgctcgccggcctgacactgcttgatacagagcaggggaacacgggcatgccgattgtggccgagcacgtcgagggccatcagcgaaaagcggttcttaatttcatggcgatgatggaaaacgcggtgcacgcaaaatcttacagcaacatctttcttacattagctccaacagagcagatcaacgaagtgtttgaatgggttaaaaacaataaatttcttcaaaagaaagcaagaacaattgtttcaatttatgaagcagttcagaaaaacgatgatatttccttattcaaagcaatggtagcgtccgtgtttttggagagtttcttgttttactcagggttttattatccactttacttttatggacaagggaagctcatgcagagcggggaaattgtaaatttaattatccgtgacgaggcgatacacggcgtttatgtcggattgttagctcaagagatatataagaaacaaactcttcagatgcaaaaagaattgtttgaatgggctttaagcttgttgcaggagctttatgaaaatgaattggagtatacagaagatgtttatgatcaggttggtttagctccagatgtaaagaaattcatcagatacaacgcaaataaagcattaaacaatctgggctttgatcattggtttgaagaagaggatgttaatccaatcgttattaatggattgagcacaaagactaaatcacatgacttcttttcaatgaaaggcgttggctataaaaaagcaacggttgaaccattaaaggattctgatttcattttcgatagcaaaggagttatttcatgagactgattaaattagaacaaccgaattgcaatccttgcaaaatggtatccaattatttaaacgaagcaggagtcgaatatgagacatttgatgtaacacagaagccagaagtggcagcgcaatttgaggtaatgagtgtaccggtgactatactgctgaatgagcaagaagaagtaaagcgtagtgttggatttaagcctgaagaacttgatgaactactaaagggattacaataaaagataatttccttaggggagggctaaccatattcggttggaatattaacgagatttcatggtggaagtacatactgcttttaatttttttaattactgtaatacctttgttgataatggattggataaccttctgtaagattaagcatattgactggattattcaacgatattcatgttgggcggcctatttaatttttggatagatttttcacataataaaacaaaaggagaatgttaaatggggaaaatggatgaagtaattgttgtagcacctagagataaagtatttgataatgaagaactagtctttcaaggaattgaatctgatctaggcaaggttgatcaaataatcgaaaatctcgctgaaagcatgatcactatgaataggggagatgctgagagggatcaaagctgtaagcaaccaattccctatgccattttacaaaaaggagaccgagtatttgcatacgagcggttaagaaaaagcggggaaaagaggcttcatgatcaattatcaattggtgttggcgggcacatgaatttaactgaagcaacaaatttttgggaagctattgatgagaacttaaggagagagctttcagaagaggtgtttatctcaacttccaatttaaatttagaagttgtggggttgataaacgatgacttaaatgaagtggggaaagttcatttaggcataatgattattgttaaactgcctgaaaatgcagaggtatctgtaagagaaacagatcaattaaaaggcttttggttaaataaacaagattttgataatccattagtatttaatcgtttagaatcttggtctaaatacgtggcagatattatttattagtttaaacccctggctttgatcatgatgtttgtcagtggagggtctcagccagggtacaacttaaaatactcaaaaaactcaacaattatgcctacaaaggagatgctggatgaaaaaaagattacgcaaaaaggcgtggatgacagggaatataaaacagggcgaattcatgtttaatgtaattgataaggtaaatgcagatggacatgtatattatccaaaaggacactatcatgtagacaggaaagggaatatgtacaagttcaaaatttagaaacaagcgaaattgtgatgactaaagttgataaagatcttagggataccaaagggtgtcgattgaacgaacatctctataaaagaagacttttatttaaaataaagaggaggaaacagaccataaacaataacagtcataaagatttgcaagcaaagtatgatgatatgctcttcagaaacggactttgtttggggtttattcaaaaacaagggcttgcagatgtgtttttggagcatatgaaacaagttgcagcttatgaagaagaccaaaggtatagagttgcagcagttaattttttgagtttattagaatcaaattaaaacaaaaaggagatttgaaaatgaaaatttcaattaaaacaaggctaaatcctactgatcaatataaggttgacgactttattaatgcatttaagaacttgccgccagaaataagaattcagctttctatggacaacgggaacagttggctgttagaacaagtgtcagtgaaaacagaaagaatccttcttgattgtttacaagaagaaattaaaaatattgataatcaccctctttattctcatgccacttcattagggcaaactgtattccacaatactcatgaaattgtcgatgttgtcaaagagtatgtgaagaaaaatggataaacatatagagaaaatacaagcccatctaaaagaaatagaaaattttaaacaaggcctccaattattcagtgaagatgaagaagaatacataagcttattagctaagattcaacatcagtttgatttaatttcagacgaatcaatggaagggtttaaagaattaactttacatataagaaatacaggtcagaaaagaatccaacggagaattgatcagttacctcacacaatcaaagaaagtgtaagtgaagaaattaaagacatgaagagagccggcgagctttttgattgatatttaaattttaaacatggctatataaacagtgacaagtatcgattgggtgtgaacttaaatacaatacattgaaaactgtgaagaactggaggttttaatgtgtttagacaatatccaatatggtacacaccgtcgctgcatactttgaattacttgccacaatttacaccatacattgcccactttaatagtgctgaacgatgttttcaacgatgtatgtaccaaacgcatggcaatgttgaatggtgccatagaaactgctacgacccgatctatcaataaatttaaccagagcagttggatttaattcctctgctctaaaaaataaaatagggggatgtattataattacatactttacgttaatacttgcagcatacttatttgcactaaacattaatgaaattagattaattactcgaggggaacagaacgtatacgctaaagtcacacatttgctttctaactcaccatataaagaactgaagaagaataagaacttagtgtatgtcatgacattgttcaaggggatttcgttcattatccccttggctactattggactgattacgcatggtaacttgctaatgttagcttgaacagcttttgctttaatatataccggtttaacaatgtttaaaattcttgatgttttggacggtgactcaaacaataaacaaaacaagttcgtgtacatgctttttgtttgcggtaatattgtcttcgtggttaactttattatcagttggtttagataaaggagaatagaattatgactcagtttgatatgcagtacaacacaatcataaatgacataattaataatggggcatctgacgaagaattcgatgtcagaaccaagtgggatacagatggaacaccagcacatacattaagtgtaatcagtaagcaaatgcgctttgataattccgaagtaccgattttaacgactaaaaaagttgcttggaaaacggcaatcagagaattactttggatatggcagcttaaatcaaatgatgttgacgaattaaacaagatgggcgtacatatctgggatcaatggaaacaagaagacggtacaatcggcaaagcatatggatatcagcttggtaagaagaacagaatgctaaacggtgaaaaggttgaccaggttgattatcttcttcatcagttgaaaaataatccatcatcacgcagacatattacaacgctttggaatcctgatgaattagactcaatggcattgactccctgtgtctatggtactcaatggcttgtaaaaggcgggaagttgcatttagaagttttctgtcgcagtaatgatctcgcactcgggaatccgtttaatgtgttccagtacaatgtattgcagcgtatgattgctcaagttactggctatgagctaggtgagtatatcttcaatatcggagactgtcatgtatatactcgtcatatagacaatttaaagattcaaatggacagagagcagtatgaagcacctgagttatggattaatccagatgtaaaagatttttatgatttcacaattgatgatttcaaattggttaattataagcatggagacaagctttactttgaggtagcagtataatgctatctcttattgcttgctgcgataaatcaatggccattgggtatgaaaataatttgctttaccatattcctgaagacatgaaacgttttaaagaactcactacaggaaagttgtgtattcaggggagacttacatacgcttcaatcgtaaacattacaagaaagccacttcagaaccgaaagaatatcatattgactaaaaataaggatttcaagcctgatcactcttcatttgtttatcattcgattgatgatgtattaaagcttataagaggacaattggataaagatgaagaagtaatggtaattggaggaggtgctatatacgaggcattcttaccacatgctgataaggtttatttgacgattgttgattcagttgctgagaaggcagattcatattttcccaggttaaatgatgactggagagtaattgaaaaggatcacaggaaagcagacaacaataccacatttaattattcatttgtgacttactcaaaataattttagaataaaaataaaatagttatagactttttagaagttgaatgataagataaagacaagttaaaagcttgtcttttttttacatacttttagaataaaaataaaataataaataggagtggcgatatgaaaactgcaacagattatcttgtttccatttccaaacctcttgttgcaattgaggagactaaacaacgacttcaaaatgaaattgataacctttataaagagctagggaaagttgataaagagctcaatgaattttatcacaagctagaagaggacaaatttaatgcttcagagggatatcacctttcgttgaaaggtcaaaagatattgagaaagcgaagaagcttaaaacaagagctccaattactgaacacgcttttcggaagtttaaacaataatggatggactcttgaatcactgaagattgcagaatataaaattagcaaaaagaaaaacaagcatttacagtatgaatcggtttaaaaacaagcctacataattaaataaaaaagagagggaagccctctcaatgtattagtaattataatcccaataaacatcaacattaacttttacttgagctacactgtcattgttatgtgctcggacatacaattgttttcctgaaataagtgatgtgtttacgctaaatactttgtaaaattgttcactaatataatttccgccactcggtgtaacagaagccagcacagtgccatctgacttcattaattcataagtcacatttgcacttctacttcctgtccctgttgaccattgtttccccatgatggaaatcttggttacgttgtttggtgtaaagctagtgactactgttgcgtaagatgcagggcctgaagtagatctacctatgttgacttcaccaacaccatttttaacgtgagtatcagtcccaagagcatgaaaactaccggtgtttgttaagacctcaagattattttgaggggcggcaaccggctcacttttagcagtagcattcgctgacgcagctacaccagtaagaccaatagttgaaactaataaagcaattgctgttttcttcattaaaagcatctcccttggtttaggtatgtaatacaactatattataacaattaattttgaaataaatggagaatgttgtgaatatatggtgaattttctgaatggagtgtgaatttcttcggtgagaactttaaggaggtgatatattgcaacaaaaagagcaagaattgctgtcaaagaaagaacagcttgaaattgatgttttagaaaaggaagcagctttactccggctagaagtggaacaagaagattccaatctccacaaaattggggagatcggtgtacttaaagaatttcttttatacataaagaaatacagatcaatgtttactgtgcagcaagcagaagaatttagaaatatggatgaccgaatgaaagaaatcatcaaagtccaggttggacaagtaatggttgatgaagaagctttagagggatttattgaggaaattgagaatcaaattaattgaaagtgggagatgaggaatgaatgaaaaattaacgaaagatcaactcgaagaaatccgtcaacgtatggaagcgacaaccaaaggattttggcatgcaaacattcaccatgaatggccagggaacgaaaatcttcgttattggatagttactcttgaggatggtttagcagctgcagtaactaaagaagacgcggacttcatcgcaaacgctcggcaagacattcctaggcttctcgattatataactgagcttgaaaggaaacttcagaaaaaagaatatgaacttacagagtgtaatcgtgtctatttagagctgttgagtaaacaagagttcaaaacaactgaaatctaagtaaaatctgtattttaaagagaaggtgatgcagtgaaagagtcgttgaagaatgattttcaagagtttatgagtattgcaaaaagctttcttgctgtttctggagcagtcttttggttattgataatttcactcgtttttgctgggggctattaaaatgaatcaatcatataaagttagtctagaaaaattaccaattgaaagcttagagagactgaaaacagacatacaaaatagaattaatgatggattgcgtaccgataacaatgcatacataaaagaccaaagaagaaaacttcaaatcgttttaaacgagctggttagacgaagtacatttgttcactaaaggaggtgaatacaatgccagtagtactttatggatttggaagaggagcataaaaagagaggggagtaatcccctcatacattaatgaaattggccattcatgctttgttgggctaggcgaactaaacgttttgtgatttctccacctactgaaccgtttgctcggctagttgtctcaggccctaagttcacaccgaactcagaagcaatttcatacttcatttgttcaagggcaccagcagcttgaggcacaagtaattcattgctgttgtttgatctgttttgttgagccatatgatcatctcctaaagttgtatgtaaacaagcttgttcaattgtattgtgtggagatgttttgtaaatatacacattaatttaaagtgaggggatttaaatgtcaattggtcatggagcatgaattaacacgtacttaaacaaagaagggggataaaatgaaaatcgattatgtttcagatctgcatattaatcactggataccttgggacaatgaccaaattaaatgggaaaggcgaacaagggagattattagaaggctgatatcgaatggaaatggagaggtattaatcattgccggtgattttactgagtggaatcaacagacactgtgggtacttgatgaagtagcaaagcagtatgaaaaggtttacttcacatatggtaatcatgatctttatttactcagtaaaaatcagcaacgaaaatattccgattcattgggaagggtgaatgatttaattcagaaggctacagacatcaataatgtcactccattaataaagtctacggatacatacaaagggaaagtctttgcaggagatgttatgtggtatcttccaaaaggaaatgaaggatgggatttcttcaaaggtgtctctaatgattcaaactatatcagccttaatggatacagcaaagaagatggggtacgagcaatgtggaaagaatcaatgggctggtatgacactcttgaaaactctcacattgatgtatttgtctcacatgttccacctgttcacaatccttattctccgtttgagcctaacagctgctatatggttgatgtcccgttcattaacgcaaaacattgggtttgtggtcatgatcatttacaagctgagtttgacaatgatggaacgagctttcacatgaactgcattggatatccatatgactatgatatgtatcctagagtaaatgagataccaggtaagcaagttgatacgtataaaacgtttgagctgaagacatttgaaatcaaatgaaattctaattttatacagaagggagaaagtaaaatgtctaatgtgaaaattaaatatgttacagactgtcatgacaaagagtttacattaaataaaaaatatgattttcgtataaccgatgatggtattgaaatcattgatgatttaggtgaagaacatatcattgcaactaaagacaatgaatatggggcttatgaacacgatgaatttttcagatcaagatttgaatttgttgatactgaataaaatgttgatttcatttagaagggataagttcaatgaaagagattgaatttgatgaagttaagaaatttgttgaagtaatgtctagagaatttagatcaacaaagatgatgaaaattaaaattagctatgctgaatggttagttgatgaagttgaacgattaagggggttagtcaaaagtgagcaatagtttagagagaaagattaatattcatttcagtaatggctcacatatcgagtctaaacaactttctaataaactaagggggtacaatagcaatttcttatgggagcaaatgcaagagagtatcacaaaggaacttaaatggtggggagtcactctaactggaaatcagaaaactgtaaaagctttaagtgagctaatgaccattaacaaaacattgtttgagaacctttataaggtgcaatcagacaccatagaagagcttgcaaacaaattatatgaacaggttcctgagtatgagaagaagtttttgaagtttgtcaatgaacagatacctaatctgaggatgtgcctacagttcgagctaccttataatcctcaactaatatccagcatagaatatgaaatttacatatccggtgccgaaattgattgcgaatacccacatgatgctagggattgcattattactttctttcaacggataccagaaataatcggttcatacaaggaggaattagatgaagaatacagagtttaaggtaacaagtttattagaggagtataaacgaagagatgaggaacgtagggaattcatcattcatgaaggctacagagctatcgaagagatcattaaagaagtgaaccaaagaggatcactaaatgaagcagatatttattatggaacacctaaaccacagttaagcttctcggacgtcgaattaggctacatgcttacttctatgatggaatatgctacaaatcatgttggaaatccagttgatgaggaatgtgaacttgaaaataagctggcttactttgagcataaggacgaaattgttcaagtttttgaagtatatggacaaggtactgacagctggtttttgaaaccaagtgacgataccgtttataaattgaataacacagcttacggagtgtatttaaaccagttcgatgatttcattaattacactaaaaataaagacaatgagagtaaaaaggtttcttatggtaccacgatcttaaatgacattgccggcggatatacagttggaagaggttctaagtagatgatcgttacagcttggattttgtttgttgcatttgggcttgttttgttagcaagaatggattccgaagggaatcttaaatttgcagtgtatattggtgtaattaaatttgtttcagttttcattgttgccattgcagcaggagtgatttggggagggttatttcaatgataaagaggattatgagttttaagtttgacgactggagacatattttctacttattaaaaagtgtagcgaagaatttctttaaaggtgattttcatgaagcgagcgatgcactttattggatacgggtacacttgtcttttgaatcaaataaggtgaagtgaacattagataaaatcggtcatttatttagagtaaaaataaaattagatgattagaggtggagagtaataactgagtacattaagaacattcaaatactgttcaacaaaatggaaagacaaatgggtacggtgaaagaagctctcgagaacaaagaatacgaaagagcccaccgtaacctaatcaacctttcggataataatgaagaattgatgcaggaaatcagatgggctcggaaagggattaagatttaacttttcttctttcttcgtggttccattcgtacagctcttcaattgagcaaccaatggcatcagcaaaagtcatgccagtagctaagttcatatttgctttagctccacttatataatcgtggatacgttgtctggggtatcctgtacgtttgaaaaggtcatcaactgtgaggtcatattcaaacattaattcatttaaacgagggcgcaggggtgtccattgcttcatttcgaacacttctttcaatattaattaacataaaacagtgtagcaaaggtttattctaatttcaattttagtttcaatattttaggagagtgattgattgggaggtacaaaccaaggcaaggtttttgaagcaaatatagaaaaatcagctgcaggtcaaaagctgttcttctatagaattaaagatgttaatccagtgtttttaaaaaggggagctgcagtatcaaaaaacaaatatgattgcttcttgcactttaaggggtacttattcccattagagcttaaatcaacaaaggataagtctattgcctttcaagagaagattataaagccgcagcagataaaacacttaaaagaggctacgcaatatccaaacgtaatccctgggtttctatttcaatttagagagccggaaaataaagtttatttcgtacatattaatgatttccttacatataagaacatagctgaaaaacaattgaaacatacatataagaataaagtaaacaaagccagcattccaattgcaatttgtgaagagatcggcacagaagtccgttcgatgaagaaaaaagttaactatacatattacttgaataagctttgcgatgatttgattaaaaaagaacagcagagtgtgagcgctgtatgagtgaattcgttaaatcatcttcaaagcaatcgtttgaaatagaaaaatatcatataacgattgaaagcataaatcaaccatcagctgaagcaattaagaaagtcaacctaaaagtgaatgaagtaatgtctaatttattagcaaaagaaaagagccattaagccggctctttttttgttgtacttaaactataatacttgtgacgattatcgggatgaccttaatgccggtcgcgatgaatcatattgccggcggggaaggcagcaaggatttcggtgatccggctaaccttgccctcggatttacggtgcttgtcatcatcgtgctgctttatcggtttacaaaaggatttttgaaatccatttcaattttaatcggcattgtcatcgggacggccatcgcatattttatgggaaaagtgcaatttgacaatgtggcgaatgctgacgccattcaaatgattaaaccgttttatttcgggacgccgacatttcatgcggcaccgattattacgatgtcaatcgttgccattgtcagccttgttgaatcaaccggcgtctatttcgctctcggtgacctgacaaacaggcgcctgtctgaacgtgatttagcaaaaggctaccgcgcggaaggtctggcggtgttcatcagcggcattttcaatgcttttccgtatacggcctattcccaaaacgtcggcctcgtgcagctgacggggattaagaaaaacgcggtcatcggtgtcacgggcgcacttttaatgctattcggcctttttccgaaaatcgcagccttcacgaccatcatcccgtcttcagtactgggaggcgcgatggtggccatgttcggcatggtcatttcctacggcattaaaatgctcagtcaaattgactttaaaaagcaggaaaatcttctgatcgtcgcgtgttcggtcggattgggactcggtgtaactgtcgttcccgatatgtttaagcacctgccgtcttacttaaatctgctgaccacaaacggaatcgtcgccggaagctttaccgccgtccttttgaatattgtttataatatgattcctaaaacgaaaaaaacccttgatgtgacaagggttcaagagggttagttatccgtttttcttaaaaaaataacattttaataacatttctttatgaaatcccgagatcgaggatgcttccgaaagtttgctgaactttttgtgaggcatcctctttttttattagtttcattgtttgaaaagaaataaattgagtgatgcggcatccgccttatttcgccgaacaaccgtcccgaactatatgtacgtgaacatatgactgaatgtaagaaaaaaaggagaatgggggatcatatcataaacgaatatcattgttcggacggtgatgacacgaaacttggtttagacatggaatgaaatgcctgatgccgaagtgcaactgcagaatgggcgctgagggggagtgtcttgtgcacggatccttacaaaagagagtgaaaagaaggggaagccccttcttttaattaatccatccttcaaaagttgcgcgatagaacccttcgattatctctactttcttaaggtaataagtaacaccatttttaacagttgtatttgggatatcccatctatgaaggtaatccattgtaaaagaatctttgatcgcttgtgtcgaaatttttgtttcagttgagtcgctatttgtattgccagggctggatgcaaaagcaggggaagcggaaacgagtaaagcgagagacaaggcagaaccagttaaaacttttttcaatttcattttaaacactcctttgttttttaatacaattgtattattacacaaaatacaataataaccaagaggttttttgttaatattttgtgggcgcagcgtgaatttttttaggggagtggatggcaaaaggggcaatcctttcatccgctgttgcagcttatttcaggatactgatatgtatatagagaaaaagagttgattattgctggcctctggtgagctgcagcctttgagtgagtgtttgatttagctattccagcgcttttccaacgggaaaggtgtgatatgaaatttaaaactgaaacaattgtacaaaagtaaaaactttatttaaaatgttataaatactaattttcaatataggaggttatctggtggcagaaaagaaaaaagctttaatcattgtggatgtacaaaaagctttcgattataaaaaatggggagaacgaaataacgtaaaagcggaagaaaacattagtaaaatactgaaattatggagagaaaaaggatggacagtcatatacatacaacatatttctgataaacctggttctttattttatccaaaaaatgagggggttgctataaaggagatcgttaaacctatggataaagaggtcattataaccaagaaagtaaacagcagctttatcgggactaatctagaagagattttaaaatcaaatgatataacaactgtcgtaataactggtttgactacgccccattgtgtttcaacaactacaagaatgagcggtaatttagggtttgatacctacctcatttcagatgcaacagcagccttcggaatgaaagaccaaaatgatacatattatgatgccgagactattcacaatatatctctggctacattgcatgacgaatttgccacaatattaacgactgatcaattaatcaatgattttataaaaacaaactgattaacattatagctaaggccggcggtgggtatagcggctgaaaagcatattcaggcgcatacaaggatctcgtctgaaaaaaggcatctgcttcagatgtttttttgtttcttgaaaaacgggctggtaaaaaatgatcggcgcggttaacggtctgattcggctttggttttgaataacaaaaggttttactaatcagcgaattattcaagattttttggcttgtgctgagtctgtgtcttttgatttcctcgaatagattggcttgatcatctttttgtggctgaggctctttgttaagacattttgggtcgatcacatttttaaaatctttgatggttaaaggcttacagtcatcttttaattcgtagcctaattgtccattagcttctaaagtggcatatttaattgaaatgccaagaagccttaaacgcatttcgagttgatctgctgtcagtctcagcttctttaagttttgtatattagttggccgtcttctatatcgaatttagattttccggttaaaaaaaatcaatccagtttacttttacttgaaaccattccatcaaaattaaagcactaaaaggatagacgcagcgattaatgttttcaataaactggtttctaaaatgggatgaacgataatcgtaccgattgaaatcatcaccattgtctgtgcgatggtcatttgtgcaatggattttctccctgaaattctcagtaaaatcattccgaatgcaattataattaattcttcccaagcaaatctcatgttatcaccctagattgtgttttatcaaaaatgaaagagcaagtaagaggtttcttaacgttagctggggaactcaggcgtcgataaaatgttctggattgatagagttgagactcggcttttggatagacacgcgggagagaattttagtttatgtgtttttgcgtctaaaagcagaaacattacaactaataatgatcatcggatgtaataaaattacgcacctaggtgctatatgctggatcaattataaaatggagtgaaactaaaaaaaggggcaaagcccccttatattagcagctttttagttgttacttgagacaatcattccgccgtcatgaaaaatcagcttttgtagacggctgtccaagtgccatcagcaccatggaaggtgatgttgtctaaataataggtgattccattccggtaaattgaagtaggataatcagggccataaccattaagtatgaacgtcgccaaagcagatacttccttcgttttgctttctgcagaaggtgtatcagcaggacctgcggcaaaagcaggggcggcagaacagagtaaagcgagtgacagggctgagccggctaaagcttttttcattttcattgcaaacactccttttcttttttaatacaattgtattattacatattatgttaaacatgtacatgcctatctttgttaattttttgtgaacaaacagataatctatttaaacgcagagatgtaataagtatgatgatgaagcaattatcatctataaaaataagatcagaaagcagatgattttctcgaaaatcatctgctcttgcgaaatgaggagttacatgacatttacggaacgggcggtagccattatcaaacagattcctgaaggaaaagtgatgacgtatggtcaaattgccggtcttgcgggaagtccgcggggagcgaggcaggttgtgaggattcttcactccatgagtaaaaagcatcgtcttccttggcacagggtcatcaatgcaaagggtgaaatcggattaagagatgaagagatattttctgtacagaagctgtctcttgaagctgagggcgtagcggtcacgtcagacggacggatcgatctcaatttatacgtccatgatccgaatatgtaaaaaacctgccgtatatatcggcaggtttttcagttatatgctgcaagccggccagaaaggttttgccggatataaggccattcctcccgaaggatggagtagtaggcggtatctctgaggccgccgtcgacagccggaatatgcgcgcggcggatcccttcaaattgggcaccgatccgcaaaatcgcagttcgtgagcgctggttgcgaacatcggttttcagcgtcaccctgacagcttgccacgcgtcaaacgcatgggtcagcaacagaagtttacattccgtattgacaccggtccgctgtacggcagaggcataccatgtgctgccgatctcacacacttccggggctgcgtccgccggccgcgtaaacacttccgcatccataaaccgcgtacttccgacgattcggtctgtttcaagattccgtactgcaaatggcaatgcaagtcctttttcataatcggaaagcgtacgttcaatataacgctttgtttcttcgattccgtcaggaacatgggtgtaagcgtaagtcgtcctattttctgaagcagcttcacaaagtgcctgagtgtgatcaatcgtcatcggctctaactgaacgagtgaccctttaagaatgacgggcttcagcattcttatcacaacctttttttatgaatggatcaagtatagtcgagcggcttatcattcaaaagggccaattttaaattaaaatggcatgtcagtgaaatcctcgcttcaaacttatgcatacattcaggaaaaaagcggaaacctttatgtgaagaggtgatgggcatggcatatgtgttatcggtcggaaccagcattccggaatatcatgtctcgcaagaaacggcggcggattttgcgagagggatgtttgccgattcatttaaggatattgaccggctgttaaaagcctttcaaaacggcgaaattgaatcaaggcagtttgtccggccgattgaatggtataaaacggcgcggggtttttcagaaaagaaccggctgtatacggaagaaaccgttaagcacagtgcggatgcggcacttgattgtttaacaaacccggattgtttaacaaatccctttccttatgaaaaagtggatgcgatcttttttatttccagcaccgggctttcgacacccagcattgaagcgaaagtgatgaatcagctgccgttttctgcgaaaacaaaacggataccgatctggggcttaggatgcgcgggcggagcggccggcctgtccagggcgtacgaatactgccgcgcatatcctgaagcatacgtgcttgtcatcgcggctgaactctgcagcttaacgtttcagccgaacgacaagtcaaaaagcaacttaatcggaacttccctgtttgcggacggaattgccgcagtactagtcggaggagaaaaggcgaaccgaaacgacgtcaaacagccgcttcttccgcggatattcgccactcaatcggtgatgatgccggatgcggaagatgtgatgggctgggaattcaccgacagcggttttcaagtcattttttcaagagatattcccaccctggtttcacagtggctgaaggacaatgttgatgaatttttaatagaatatggtgtcggtcctcacgacattaaaacctttcttgcccatccaggcgggaaaaaggtcattgacgcctatttaacgagtctttcaatggacaccggtcagcttgaggcatctcggaaggtgctgcaaaaacacgggaacatgtcttccgcaactatttttcatgtgataaaagaacagttgctccgcggccggcagaaagaaaacgaaaaagggctgatcggcgctctcgggccgggattttcgtctgagcttttgctgttcagctgggaaaagggggcttcttaatgttttggctgtttatcatgctgcttgcggcccagcggattgcggagatgatcgtggcccggcgcaatgagcagaaggtgaaaaagcaaggcgcagtcgaatacggagaaggacattatctctttctcgtcctgatgcacgtgctcttttttgtctctcttacagctgaggtggcggcgtttcaaaaaacgctttctccaaggtgggccgccattatatgtattattttatttgtacaggggatcaggtattgggctctattatcattagggcggtattggaatacgaaaattcttgtcgtgccggatgcggagcttgtcagaaaggggccgtacaggtggatgaagcacccgaactacgcggtcgtcatcttagaatttatttttctgccgctgttatacggagcgtattggacactgtttctcttttcgattctcaatgcctgcatgctcactgtaaggattcgcgccgaagagaaagcgctagaagaaaacaccgcaaaatagagattgaaaatcattctcactcatgataagatgtaaatatgaaaatgattctcattcaaggtggtgccgaaaatgacaatgttatttttatttgcagccgtttgtacatacagtgttttaattggtttcgtattgaaaaaagtttcgaataaatcgatgtcttcttaaacatctgcggtttttaatgccgcgggtgttttttctttatcagctgccgatatcggcggcttttttacgtttcctgaagaaaagtgggccattcttgtgtaaaatgggggagaggtttttttcagagctttctaaaaatgaaaacgtcatttgatgcgacagacacaaaggggttaagacacatgacagaagaagaacgccataacagggagattttcagcagaacgggtgccttatacgtacaattattggatcaccaggatgaaaaacgggccgatcagctcgcggccattatgaaaaaagcggctgatgaagaggtttatatcgcgtttaccgggcattattcggccggaaagtcctctttattaaacacattgctcggtgaagacatactgccgacaagcccgattcccacaagcgccaacctcgttgtcatccggcacggtgaagataaagtcgtgcttcatacgacggacggggcttatgcagaaattaaaggaagttacgataaaaaacaagtgcagcaattctgtaaagacggtgagcaaattgaaacggtggaagtctatgccggctttaaggagtcagagccttatgcggcctacattgacacaccgggaattgattcgacggacgaagcgcattttttatctgccgcttcggttctccaccaggctgacgctttattttacgtcgttcattataatcacgttcattcagaagaaaatatgctgtttctcagctccatcaaagaccgtattccgaatttgtttctgatcgtcaaccaaattgacaggcatgatgaaaccgaaacgaagtttgaagagtaccgcaggcaggtggaagatatgcttgaaggcgcgggaataccgaaagaatcgcttttctttacgtctgtcactgagcctgaccatcctttaaacggcatggaacagctgaaaaaacatctgcagaagctgaaacagcaggcaaaaacaaatttatggtccttaacggagagaaaagtcgcacacttagtcaaagagcatacagagatgctcgtaaaagatgataaaaacggaagcggagagcagtttgacaaacaagaagcacttgtccgttctgttgaagatgagcttaataaagccgttcaacaggctgaaacagcagagaaagacatcagaaaagacgtgcagaacatattgcaaaacgctaatttgacaccctttgagatgagggagcttgcatctgcttatattgaatcacagcagccctcatttaaaaccggattattcttttcaaaagcgaaaacggctcaggagaaagagagaaggcatgctgaattttttgccgatattaaaaaaagaacggaaggggaagcggattggcacattatcgacacatttacgaaagcggccaagcggtatgaagcggattcggacgaactgatcaagaaaatccaggcgtaccgcacaccgctttctgatgatatcaccgctcaggcccttaagcagggagcggccttttcatctgaatacgtattaacttatacgaaagacctcgctgagatgatcagaagggaagccaaaagacagacagcggaactcattgagaagcttaccgcttatgttcaggcaaaaaacggaccgctcattgagaacttgaaaaaccggctcgaaaaagaaaagaagataagggatgagctcgcgcaatcggcaaaagaagaacgcaatgccttggaaaaagcagcccgggtccgcgctttgtgggaagaagaattgacctgtgatacgggaagcggcgactggtatacgcgaaaaaaacgccttgcaaaagcgcccgtccaaaaagagaaaccaaaagagactgtacagtatgaagtaaacaaacccgaaaaaaatgcgatgaaggaacttcctataaaagagcagactgatcggttctatgagcttgccgggattcttgaatcctcgagcatattaggaaaacaggcagaagcctttcgaagcaggattgagcggcttgaaaaccgccagtttaccttggcgttattcggcggattcagttccggtaaatcatcatttgcaaatgcgcttgtcggtgaatacgtgcttccgtcatcaccgacgcccacaacggctacgattaacaaaataacgaaaccgcaagccggcaaaccgcataaatctgcggagatcgtttttaagacggaggaggatctggacgctgaaatgcttcagctgactgagctgaaagacgctgatgtaaaggggcgttcactgaaagagagatggaattatgccattaaaaaggggaaagttccggatgaacttatcccggtgattcagacgatgctgcaggcgtttgatacgtatgaagaacagatccgtcaaaggcagacactgacggtgccggtggaagatttaaaaccgtatgctgccgaagaaaaaacggcctgctgcgtaaaagaagtcaccgtgtattatgattcgcctctcacgcaaaaaggcatcacaattgttgatacgccgggagcaagcagtataaacaagcgccatacggaacttgcctttcaatatataaaagatgctgacgcgttcttttatatgacgtactatcagcattctttttcaaaaggagacaggtcttttctgaagaaactcggcctcgtcaaagaatcattcggcatggataaaatgttttttgtcattaacgccgccgatctggccaaaaccgaaagcgagctggaaaccgtcaaagactatgtccgctcagaactctcaaaagagggaattaaccggccaaaattatatcatgtctcaagtaaagaagagcttgcgggtaaaaaagcagctttttataacaggttctctgatgtaagaaccggacttgagcactttattgaggaagatgtaatgagggccagctgcgcccagctgaaaacagaggcggacaaattgtgcgatatggtggaacagcttcacgaatctcttcaccagtcggcagaagaaaaagagaaaaagaaacagcatctggagtcttcctatgaaaaagctctcgctgacatttcaaagcgccgtacgtctgaggtcatcattcgaaaagtgatgaaagatacggaagaacagctctatcacattaaacatcgcctgacattttatgcgaatgatatgctgaaaaccgccttccatccgggccttcaaaacggcgattggaaacaaaatatagcagcggcgctgaatgaagcgctcaaggaattccgttttgaatatattcaagagctgaaaacgctcgatatccggatgaccggttttattgagcgccatatgactgaggaatggatggaaaactgtcagaagaagcttatggaagacggagatttctccatttatgtgagcgccgaaaacgaatttgccgttcagctgaaagaagtcgctccggtcattgacgtctcggcattcacacatcacataaaagaagttaaatcgccgaagcagttttttgaacagaacggaaaagcagcgtttgtagaagggctcaggctcagcctgcaaaaagtgacagaaaagtggcttgagcaggagaaagaaagcctttcagagcgatatactgagcaggtgcgccgtctgcaagaagacatggcggataaaagcctgtcccagatccgcgagcagcgggacacttatttacaaggtcttgcggaaaatacgagtgcaagggaaattgaacacctttacgaagccgaaaaagcatggaaaaagaaagatgaaatgctgaaaatttaaaaatccggttggcgggcagataacagtcgtggtagactaaaatgaaaaaagcgagatgaaaccttttatgtcagaagtccataaagcaatttcagcacattccgcaaaacagcatcagcacgtcaaaacatttgtacagcttgactaccagcgtgaacaggccattgaagaagccattgtaaaatgcagacagaatgaaccgttcacgacagatgccatcaatggcattaccgcaaaaatgaaccagctggcgaaaaagggcatcgtgccgcaaagacgattcgtaagtgaagagatggtgaaagaattcgtcagcagacagtaatggatgaacctgccgcgtgtgtcatcagcgcttgctgtacatactatccgtatcttctctaaggggggatatgacaatgggcagaacaaaactgggaaacagaaatgttcagcagaataacaatgccaaaaagaaaaacggtttcggacagaaatttgattcttatgccggccgtgaagctgaaaagctgatggcaagcaataaaagacacggtgagtaacgtgacggcagcatcttccaaatggggggatgctgtttttttaccgccttctttggtaaaataggaacattgaataaaaaaaggagtttcgatatatgaataacaaattactgctcgtggacggcatggcgcttttgttccgctcgtttttcgcgacggccgttcatcgcaattttatgataaatgaaaacggaatcccgacaaacggcgtcaacggttttttaaagcatctcattacggcggttgatacgtttcagcccacacatgtcgtctgctgctgggatatgggaagcaaaacgtaccgcaatgatttgtttcaagattataaggccaacagaagcgaaccgccgcttgagctgattccgcaatttgatttagcgaaagaagcagcgcgagagctcggttttttaaacatcggcataaaaggctatgaggcggatgactgtatcggtacgctttctgccctattttccggagaagcggaaattacgattgtaacgggtgataaagatctgcttcaattgatgaatcatcaagttcaagtagcgctgctgcaaaagggtatcggcaattataaggtatatacagatgagatattcagagaagaaacgggggttccgccaaaagcgctgattgacattaaggcgctgatgggagacacgagcgataactatcccggcgttaaagggatcggggaaaaaacggcgtacaagctgatccgtgaatacgaaaacatagaacggttattagaaagcctcgctctcttgccgaagggccagcaaacgaaaattcagcaaagcttgaaagaattggagctgtcaaggcagcttgctgaaatacattgcgaggtgccgttagtctgtacgcttgaagaagcgattttttcattgaagatggaagaagcatccttaatgctcagacgccatcagataaaaggaattgaaagaatgctcgaaaagctgaacgccagagagatcagctgatccctctagcgttttgtattgcttttttttgcgttgttttcaagggctgatttcgggtctttatgcgcatttccttccatatttccctgaggattcacgcccccggtctgccggcctttattttcttttctcatagctgttcacctcatttgtaggatgaacagtgaaacgcaatttcattccggttatttattcagccggaccgctttttttgcgagctgatcggctgtttggttttgtctgccgggaatccacttaatgaaaaacaatggaaatccggcctttaagcggatgatttcatccacaaacggctggaaagccttgtttttaaccgcttcaagttccgcggcccgctccacgatatctgaatccgtccggaatgacacggactcaaatccgcgggcggcacacagcttcattccttcaattaaagcgagaaattcagcttcctgatttgaatggtcgccgatcggaattgagaaagattctgttttcccgtcatgtttaataaaaataccgataccggaggggcccgggtttccggcgcttgcaccgtccacgtaaatttcagcaggcatcatccgtcactctcccttcggtgtcattcgttttgccgcatacgcataagggacagaaatgagtgataccgcaaatttaatcaggtaagtcgaaataaagatgctgaaccatacgcccgcggaataaacgccgataaaggccacggcagtgaagataaatgtatccagcagctggctgagcgccgtgcttccgctgtttctgagccagagaagcctgtctgaaggaaagattctccgaatggctgaatatacataaacatctatcgtttggctgaaaataaaagccaagaggcttccgagtgcaacacgcggcagaaaaccgaaaatcgtctcaagggcaggctgcgcgatatctgacgcagccggtttatataaaagagccccctgcatggcgcatgtcaaagcgagcaaagtggaaaagccgagccagacggctttgcgcgcttctctgggaccgtatttttcattcagcacatccgttgcgaagaaaacggtgccgtacatgatatttcccagtgtcgccgtaagcccgaacagctcaactgttttgacaacctgcaagttggcgcacaccgtggcgaaaccgatccatacgaataggcccgttttgccaaatcctttataaaacagaagaacaatgataaaatgaatgaccgcaaataagatccataacacatcgttaaacaaaacctgctgacttcctttcaatttgagaatggtttgattatagcacacgcccgtcaactaatgaatggtaaggtgatttcaatgaatcttaagccgtatatcgaaatagaagcaaaaggaacaggccctgtcgcgtttttttccgaagattggctgaccgttccgaaagcgcgcatgcttgcaagagaagtcagccgctttccttatataaaagacatttattttgaggatgaaaaaggcgcgagctggacgcttaaagaattagaaaagcttactgaagaacttgcgtacgaacctgacgacattacagtgtatttcgacggcggctttgacaaaacaagcggacgcgccggactcggaattgtcgtgtattattctctcggcggcaagcggcatcgcatacggaaaaacaaaagcttaacgcttcagacgaacaatgaggcggaatatgccgctttgtacgaagcgcttaaggaagtgcaggaacttggcgcaagcagaaattcaatcacgataagaggggattccctcgtcgttttgcatcagcttgacggcagctggccgtgttatgatgaaacgcaaaacgaatggctggataaaattgaagcgctgctcgaatccttaaagctgacaccgacatatgaagccgtaaaccgaaaggaaaatcaagaagcggatgaccttgccagaaaaattctctcggaccggcagattgaaagccgcataacattagaaggtaacggagatgactgatattggataaaaaaagcatttataaagaattgacagagcttcaggatgaatattgcaaagactgtttcgtaaaaaagcatttccgcaaagagtttggaaaaacgcacgctcattctttctgcatcaaccaatgcacggtgggggagaagctgaaagcctacggcaaggtgctgacaaatcaataaaaaataaaaccgcagcttctgcggttttatttttcgaattcatcaagctgatgctggcaatcgtcgagaagcattcgctgcttttgcagaaaatcctggtcgagagcttgcagttcactggattgtgacatcgttctggcatcctgaatcgcctggtaagcagactccaccaaagttgaactttggccccgggtagccgctcccgttgttttctgggccgtttccaccgctaattcaagctggcgtttatccgtcagtccgtttggaaaaaattcagagtccattaaaaaacacctccgcaaatagtttggagattttttttagaaatatgtacggaaaatagaaaaaaatatagaaaataagccgatataactattgaacctgattaattagggcttatttactattattcagggtatcttgggagagaagggaaaaaccagccgtgaatgataatgatttaaaaacaatccttcagcagacatttaaagaaatatacggtgatctgggaagtttagcggaaatggcgaaaaaaggaatgccgtcaatggagaaacaaattgaagaaatcgagcagcgctgtaagcagaatcttgtcgcaattgagattcagacggcaatcaaataggagaggcatacgcctctcctctatttgtcatctgatcaacatgtattgagtttagagttttacaacattagaagcttgaggtccacgattaccttcgacaatttcaaaagaaacttcttgtccttcttctaatgatttgtatccttctccttcgatagcagtgaagtgaacaaatacgtcgtctccgccttcaacttcgatgaagccgaatcctttttcgttattgaaccattttactttaccgttttgcatattgcttaattcctcctagtactgtagcaccttcgtgctaaaaaaaattttgtcatcatccaaccgtacgtatgtaaacgttgttaaatgatggttcaactatacaccatatgggagcgggcgtcaagcggccgctccctattttttatctttatttttccagtaacaaagcttaaccggaaaaaaacaaaaagcacacgaatcgttcgtgtgcttttcttttacgataatgccatatccgccttcccggccatcatttcagattcttttataatgtcctgcaaaatgacttcagaagagttggggaggtgaaggcttttaatattgctcttcatccggttcagcttctcctcatccgcaagaagggaggtgacagactctaaaatttcttcgtggcggttgaccacgacagccgcaccgcgatcttcaaagaaaatggcgttttccttttcctgtccgggaaccggtttgtacaaaataacgggtacgccgatcgccgtcgcttccgtcagtgtgatgccgcctggttttgtgatcatgcagtccgtaatacggaacagctcgtcaattctttctacataacccagcactttcagccggtcggcattgtcaccttccaagctgctgagggattctttcagcgagctgtttttgccgcataccaccacaacctgcacctgatcgtcatgaacgagattttcgcacagttcttttacgtttttcagcacaccatgcgctcccgccataataagaagaacttttttgtcgggagagagattgtattttttataaatcggctctttcggcatcgattcctcgaattgaggcctgatgggaatgcctgtgatctttacgttgttcgggtgagtgccgatttcaatcagtttttcctttacgtaatctgtggcgacataatatttatcaacattttcatgaacccagattttgtgaaggcagaaatcagtcattacgttgaacgtggggatcacttttccggttctccgtctgtattccggtacgacaatcatcggaaatgtattgataataatgtccggcttatgctcttcgacgagctggcctaaacgtttatttcccattttaaaataaatattgaatttgcgtttattatagattttgtcaactccgtaataaaacaaacgataaaactgtttcccgattgagaagctttttaaataaaggtattgagtaacctctgaaacaatcggatttgactcttgatacaaattggaaaccgtcacatctaagccgagacgcagacattgttcgtagagcgttttggccacttgaacatgcccgtttccgtaatttgcagtcaaaattaatacttttttattggtattcaagtaaattcacctcaatgtaatcaacaacaagcaagcttcatgcatcgtaaggagttattgtctatagataaacataacacaagtgcatcattttataataagcgcgccaacatatttaaactaaatttaattgatatgttccattattttaaagttttgttatacgcatactgaatcaagagtattttatcatatttttgtcaccgtatcacttaaaacaaaaattaatcccattcatacggagtttcctgatatacgtaataattcagccaattcataaacaataacgttgcatgagctttccagcggttaacaggttctttcccgccgggcgcaaaatagtgcttaggagcttctacgtttgaaagatttctctctatgtctctctcatactcctgaagcagcgtatcggtatcatattccggatgacccgttaagaaaatctgtttttcgtcttttgaaacgattaaacagacccccgcttcctctgaaacgctgagcacattcagatccgaagccgattgcagctgctccgtattaatatctgtatgccgtgagtgtggcacatagtatagctcgtcaaatcctcttaccaatctctcatgttttttaagaacggtatgctcaaacacaccgaagatttttttcggcagctccactttctcaatgccgtaatgatagtataaaccggcttgagcgccccagcagatatggagtgttgaagtgacgttcgttttgctccattccatgatttccttcaattcttcccagtaagaaacatcctcaaacggcaggtgctcaatcggagccccggtaataatcattccgtcaaaccgtttgtggcggatgctggaaaaatccgtataaaattcatccagatgctgccttgccgtattttttggagtatgtgtgctcggaattaaaaacgtaaagtgaacttgtaaaggtgaattcccaagcatcctgaggagctgggtttccgtttggatttttttcggcatcagatttaaaatcacgatcttctgcggccggatatcctgatgaaaagcccggctttcatccattacaaagatgtgttcactttcaagcacctgcttagcgggcaggtgatttggtatattaataggcaacatgccacctccgttattccccgttaattttcttcattatagaaatttttaagccatttttcaatccatcccggcgtaataaaccgtatttaacgcataatgacagggataaaagcggcaaatgggtataaattcggagcggctcttttattatgacgggtaaagagccgtttggttcctcgaaaaaaacgttttccgttaagtggaaggaaaaagcggttaccgtttgttttgcagtgtaaaacaggtaaaataaatgaagaatgtaaaaaggagggccgcagatgacaatttacgatataaacgtacggaccataacaggcgaagacatgacgctatcggcttacagaggcaaggtgatcatcattgtgaatacagcaagcaaatgcgggttcacatcccagctcaagcagcttcaggagctctatgatacatatcgggaggaaggtcttgaaatattgggatttccctgcaaccaattcatgaaccaagaacctggaaatgaagcggaaattcaagagttctgtgtgaaaaactacggagtcacattcccgatgtttgcgaaagttgatgtcaatggggcagacgctcatcctctcttcaaatatctgacggaacaggcgaaggggatgctcggcacaaaagcggtcaaatggaatttcactaagtttatcgtggaccgaaacggtgaagtcaacgggcgtttttcaccgaacgtcaacccaaaagagcttgaagatacggtgcagaggcttttggcccgataagaggtgatacggtgaacgaaaaagagcagctggaaagcgtcaggaattgggtcagagaaaagcttatcaatgaacgtacgggccatgactggcttcatatttcccgggtcgcaacactttctgtttatatggcaaaagaagaaggcgccgacttatttatcactgagacggccgcgctggttcatgatctgattgacgccaagctcgaaaaaagcgaaaggctgacggcaggcgaagtgacagaacggctggctgctttcaacattgcggctggctccattgaggagatcgcggatatcatcacgagaatgtcattcagacacagggaactgctgataaagcggccgctttccttggaggggaaagttgttcaggatgcagacatgcttgatgcgatcggcgcagcgggcatcggcagggcttttatgtttgccggcgcgaagggtcacccgatgtacggaactcaaacaagtgtgctggcccatatagaggataaattaatcaagcttaaaggcttaatgaatacaaaagcgggggcgggtttagcagaggagcggcatcaatttcttttgcagttcgccgcccgtatccaaaaagaggccggcatcggcaaaagctaagcggcgcaatagaacgcttgtgccgactatgttagaataagtgtcagattgcgcataggaggaccaatatgaagattaaatcaatagaaccgacgccgagtccgaacacgatgaaagtgattttgactgaagagcttccggcggggaaaagcaacaattacaagcctgatcaggcagatgatgctccggccgtcgtacgtgatattttaaacattgaaggagtaaagggtgtttatcacgttgccgatttcctggctgtggagagaaacgcccgttttgactggaaggacattctgcctcaggtccgttccgctttcggaatggaacatacggagcagtctgagagccgttctgaacaggaatcgttcggtgaagtgaaggttttcgtacaaatgttcagcggaatcccgatgcaggtcaaattgacggacggcgaacgtgaagagcgcttcggccttccggaacgtttccaagaagccatcttaaagctgcgttccgaagcttcaaatgttgtatttgagcgggcttggaaagaacaaggcgtgcgcttcggggattttaccgaaatcggacacgatgtcacagaagagcttcaggccgcctacagtgatgagcggctcaaacgcctgacagaagcagccgtacagcaaaagggtgaggccaaaccggcagtgcagcggaaagcttataaagtgactttggaaatgctcgatgatgaagactggaaacagcgctatgcccatcttgagcaaatggatccggatgaagacgatttaccagtattagaaaaggcgctgcatgatccgaagacttcgatcagaagacaagccgtcgtttatttgggaatgatcgaaaagccgtctgtgcttccgctgttatacaaagcgcttgaagacaaaacggtgacggtcagaaggacggcgggtgactgtctgtcggatctcggcgatgcgagcgccatcccggctatgacgaaatcgctcagtgactcaagcaagctcgtgcgctggcgcgcggccatgtttttatatgaagtcggcgatgaaagcgcactggaagcattaaaagcggcggaagacgatccggaattcgaagtcagcctgcaagtcaaaatggcgattgaacggattgagcacggagaagaggcgaaaggttcagtctggaaacagatgactgaaagcagaaaaaaagaacagttataacaaaaaggtgcgccatgcaccttttttatttgaattcactttttataaaaattatttagaatattgttgaaaaatgattcaaaactctatatagtaagtacaatattaattgttggagggtttttatcgaaatacagaaagaatagaaaagcgagacagggcaaagacgctgtaaacaggtaatttgcagaacgcgccctagaataaactgaaaattttaaaaatagtgcacagtctaaaaacagtagggggatcaccatggcagaattacgcagcaacatgatcacacagggaattgacagagcgccgcaccgcagccttcttcgcgctgccggcgtaaaagaagaagacttcggcaagccgtttatcgcggtctgtaattcatacatcgatatcgttcccgggcatgttcacctgcaggaatttggaaaaatcgtaaaagaagcaatcagggaagcgggcggtgtgccttttgaatttaacacgatcggagtagatgacggaatcgcgatggggcatatcggcatgagatattcactgccgagccgtgaaatcattgccgattcagttgaaacggtcgtctcggcgcactggtttgacggaatggtctgcattccgaactgcgacaaaattacgccgggaatgctgatggcggctatgcggattaatattccgaccatttttgtcagcggggggccgatggcagccggccgcacaagcgacggccgcaaaatttcgctttcttcagtatttgaaggcgtcggcgcatatcaagccgggaaaatcggtgaaagcgacctgcaggagctggaacagttcggctgcccgacgtgcggatcttgttcaggcatgtttacggcaaactccatgaactgtctgtctgaagcgctcggtctggcgcttccgggaaacggaacaattctggcaacttcaccggagagaagagagtttgtgagaaaatcagcggcccaattgatggagaccatcaaaaaagacattaagccgcgcgatattgtcaccgaaaaagcgattgacaacgcctttgcgttagacatggctctcggcggctcaaccaacacagtgctacatacgcttgcgcttgccaatgaagctggggttgagtactctttagaacgcattaacgaagtggctgaacgggtgcctcacttatcgaaattggcgccggcctcggacgtcttcattgaagatctgcacgaagcgggaggagtctcggcggcccttaatgaattggcgaaaaaagaaggggcgcttcatcttgacgcgctgactgtaacaggccgcacactcggagaaacaattgcgggtcatgaagtaaaggattatgacgtgattcatccgcttgacaatccgtttaccgaaaaaggcggtttggccgtcctgtttgggaatctggctccggacggcgccattatcaaaacaggcggcgtacaggacgggattacaagacatgaaggccccgctgtcgtctttgattcccaggatgccgcgcttgaaggcattataaaccgcaaagtaaaagaaggagatgttgtcattatccgttatgaagggccaaagggcggaccgggcatgccggagatgcttgctccgacgtctcagattgtcggaatggggcttggcccgaaagtggcgcttattacagacggccgtttttcaggagcgtcccggggtctttcaatcgggcacgtatcacctgaagcggctgaaggcggcccgctcgcattcgtagaaaacggcgaccatgtcatcgttgacatagaaaaacggattttggacgtacaagtgcctgaagaagaatgggaaaaacgcaaggccgaatggaaaggcttcgagccgaaagtaaaaacaggatatctggcccggtattccaaactcgtaacaagcgccaatacaggcggaatcatgaaaatataaaacagaggcctgaacaattgaattccggccccctctatagtatccttgacttcatataaggatttttagagggggcttttttatgtcaatggcttatgaagaatatatgcgccagctggtcgtgccgatgcgccgtgagctgacgggtgcgggttttcaggaattaacgactgctgaagaagtagaaagctttatggaacaggcagagggcacgacattggtcgttgtcaactccgtgtgcggctgtgcagccggtctcgcccgtccggctgcgactcaggctgttttacagcatgaaaaagcgcctgatcatacggttaccgtatttgccggtcaagataaagacgcaactgcaaaaatgcgtgaatattttacggggcaggaaccttcctcgccatcaatggcgctgttaaaagggaaagaggtcgttcattttattccccgccacgaaatcgaagggcatgacatggaggaaattatgaaaaatctgacggatgccttcgatgcgcactgctgaaatgcccgaattccgggcattttctttttggagaaaaagatgatcacaacgagttacagaccaagcgaatacacgatacacacagcgcagtcactcagtgtcaggctgggtgacacttactgcagccgcaataaacagcccattgaaaaaatgctggaacgagccgctagcgatcttttagtcatcggaaaggaacggttcgaactttacacgaagcaaggggagaagttcttttttcacccgaatacagcgatgttccgcgcaaagcggtttttgagaggggaagccgagccgttgttaaaagcagccggattacgcgagggggattcctttttagattgtacgctcggcctggcatccgatgcgattttggcaagcctggcagtcggaaaaagcggacaagtcatcggcctggagaaaaacaagcttgtctcattgcttgtagaaacaggacttcaaacgtgggaaaccggaatggagcagctccaaaccgccatgaaacgcattcaggttaaacatgccgactgcgccgattatttgcgggagcttcctgattcatcggtagatgtcatttattttgacccgatgtttcacgaacctgttgaaacgtcagacggcattgcaccgctccgcgcgctggcagaagagggttttaacgaagagtgcatcacgcaagccgtccgggcggcgaaaaaatgcgtagtgcttaaagaccattggaaaagcccgcggtttgaacgatacggcttcaaggtgctgaaaagaaagacggcgcttttccacttcggtgtcatccatgtaagctcatgatatcatgggcttctttttcgttaatcagtgatttccataacgacaaaataaagcagcgtgagaagtgatacagtcgcaaataaagcgttaatcatctcatcccctcctttttctccttcttattgtaagcggtttatccactcggtcacagttaccaatttcccatattgcatgataatacggtgccggacatgacgccgcgctttaatctatgctaaaataaaggaaaagaggacaataaaacagaggggaacaatctatcatgaaattgtggatgaaaaagacccttgtggttctgtttaccattgtaacgttcggactcgtgtctcctccggctgctttgatgacagacaagccttcaggacagtcgagcagtcttgagcagaatgattacaccgctttttatgatgaacacgccctgacgggagaagcgaaggcagggcgggagcctgaattactgtttcaatcgtatcagcagcagcttctcggtgatgctgaaaatcaatcatttttaaaattcggcagcaaaatctctccggtcattgaagatgattacagaagtgaaattctgccgaaaatcgaagatgtcatcacaggacatttagccaagtttcaagatgatgaagcgtatcaggatgtggttatttccagtaaaccgtcggccggaaaaactgaaaaaatttttcatgtgtataacaggctgacaggtgaagatcttttaaggttccacgtccgccgggatcatcctccgcaagacggctactggtttaattttcattaccataccgctgaagacggatttcaatcacatcatgagctcggcagcatttactgggaccgcaatacgccgcctgactggatgagcgtgtaatagcgagaagaaataaaaaaatcatttctgagaaattttgcagaaatgattttttattgtgttacactactaaaagactactttaaaaggatgaaaaaaatgaaacaatataaagatttgtgccgtcatgtgttagaaaacggagaaaaaaaaggagaccgtacgggaacgggtacgatcagcacgttcggctaccaaatgcggtttaaccttcaggaaggtttcccgatgcttacgacgaaaaagctccattttaagtccatcgcgcatgagctgctttggtttttaaaaggagatacgaacgtccgctaccttcaggaaaacggagtccgcatctggaacgaatgggcggatgaaaacggagaactcggaccggtttacggctctcaatggcgttcgtggcgcggagcggacggcgagaccattgatcaaatctcccggctgattcatgacatcaagacaaacccgaattccagacgtttaatcgtcagcgcctggaatgtcggcgaaattgatcatatggcgcttccgccctgccactgcctgtttcagttttatgtcgcggacggaaaactgtcgtgtcagctttatcagcgctcagcggatgtctttctcggcgtgccgtttaatattgcgtcttatgcgcttttaacaatgatgatcgcgcatgtgacgggacttgaaccgggtgagtttgttcatacattcggagacgtccacatttaccaaaaccatgtggagcaggtgaatttgcagctgacaagggatgtccgtccgctgccgaaactgcggtttgcgcgaaatgttgattctatttttgattttacgtttgaagactttatcattgaggattatgacccgcatccgcacataaaaggagctgtcagcgtatgatttcgtttatttttgcgatggatgagaaccggctgatcggaaaagataacgatctgccttggcaccttcccgatgatctcgcatatttcaaaaaagtgacgacgggtcacaccattgtaatggggcgcaaaacgtttgaatcaatcggacgcccgcttccgaaccggcggaacatcgttgtaacctcacgggacgaatcttcattcccgggctgtattaccgccgactcggctgaggaagtgctcaagctgatcccggcggatgaagaatgctttgtaatcggcggtgcccagctgtacagtgcgctctttccctatgcggacagactttacatgacaaaaattcaccatgtctttgaaggagaccgtttttttccggaatttaatgaagctgaatgggaattgacctcccgcaaacagggagtaaaagatgaaaaaaacccttacgattatgagtaccttgtatacgagaaaaagaattaagcagggggacaagaattgattcgttacggctgccttgtgatgtacgttgtatttatgttcatgaaaaatattcaggaatatatcaatcaaaaagagcttgacccgcggctctcttttcaaaaacagatgaggctggtgtatgagcggccgaaagcctttatgagaggctgcattgacgtgtcgggatcggcaatcggcattcatcatgatcagccgataccggacggccccgtattgtatgtgcatcccagattgcgcccggctgatcttctgctgcttgcgggacatcttgaagagccggctggttttatcgctggcgagaaagctttccggatgccgtttctcggaaattggctgcgtctgatgggtgtcatttgtggcggagacagccgggatgcagtgcttcaggaggcggaagtccggctgcaaaaagggcaaagtctgattctgtccgaagacggcaaaatcaatccggaggaactggcccttcgtttcgatctcccgattgtgcccgtcagcacttcgggaacagaccggctgctgcggggcaggttattgaaacggctgaaaccggctgatattgaattacatataaagcccgcttattatccggccggtcagaaacggctccgtgcataaaaaaagcacagtctctatacgagaggctgtgcttttttatttcagataaagggaactttgacgcaataaaacaaaatacagaaaaacatcgaggcgctgccgcctaaaacaaaactgtgccaaatggcgtgatgatacggaacttttctccaaatataaaatattgtgccggcggaatacaataagccgccgaaaagaagaaggccgaaaccgggacctgacagcgaagcgtacagcggtttaatggcgatgatgatcagccagcccatcattaaatagacaagcgttgaaaaaatgataaaccgcttcacaaaaaagattttaaacacgatgcctccgatggcaagcgaccaaacaataattaaaagggtcagaccgagcgtccctttaaggggtcctaataaaaatggcgtatatgttccggctattaatacgtatatcgcggaatgatccacaatttcaagaatgtctttcgtttttttatgctggatgctgtgcaaaagagtcgagctgagatacagcaggagcattgaagcgccgaatatggaaaagctgacgatgtctgtcggcgagccgtatttcaccgcaaagataatgagaaaaataagcgccggaatcgacagcaatacaccgattccgtgtgtgacggcatttgcgatttcttcttttattgtgaacaatcaaatgtcctcctttttaaaggatttgtttttgcagtgactgcaaaaaggtcaacccttctaatgtgatttttgttcctgcgcgtcctcggccttttgtcacatagttcatcttttctaagtaatcaagcctgtttctgacttgctggggcgttaatgtcattgtgctgttttcgcttaattcggatatgctccgtctgctggcgggttcgccttttgtatttaagtctttaattgcttccaaaataaacaaaaactcttctttctccatcaatgtcagccgtttttcttttttcttagcggttttcgctttctggctgtttttgatatacggcgggacatgctcgggataaatcgtgctgccggatgctgccgcggccatatagtgcgccgcattttcaagttctctgatgttgccgttaaaggtgtgccgctcaaacagcggataaacggacggatcgatatgaacatgctgccccgaggctgtcagcatatgctgcagaagaagcggtatatcgctttttcgttcagataaagcagggagcggaaggcctaacacgtgaagcctgtaaaataaatctatgctgaacgtgttttccgcgccggtatcgccaagattcgccgtgctgcttgcaatgatgcgggcggaaagcccggcgtccagctcggaaagaaggcgggcctgtaccgagagcggcatgtctccgatttcatataagaataatgttccgcggcgggccctgtttaatgcgccttcagccccgaacagttcatattcgagccgctcttcgctttgactgcagtgaacggtaataaatagttcgctgtttctgcgggatttatgatggatcgctctggccatttgtttttttccggttccgacttcacccgttatgaagaccggcaaatcagataaggcaaattgcgaggccaatcgtttcgcttctgaaaaggtgtgatgttcgccggctagctgataaaaaggatcagtttgttcaattacactcataaattggctccttttggttctaattggtttaagtataacacgtttatgcgatcgaaaatatctttttctcttgtatcggttcatttatttttatttacaaaattaaaataattatcttattgtttgaatattcatgttataatggcatattaaatagggatttaaataagaaaggactctgtaaatgaaaccgttgcttaaagaagactctctcatccaggtaaaagacattttaaaagcgcaccaaaacgtaaaggacgttgtgatacatacgcctttgcagaggaatgacagactttctgagaggtatggctgcaatatctatttgaaaagagaagacctgcaggtagtcagatcatttaagctcagaggggcttataataaaatgaggcagctctcaaaagagcagactgaaaacggaattgtatgcgcaagtgcgggaaaccatgcgcagggggttgcgttttcatgcaaacacctcggcattcacggcaagatttttatgccgtcaaccacaccgagacaaaaagtatcccaagtggaactgttcggaaaagaatttgttgaaatcatattgacgggtgacactttcgatgatgcgtataagagttctgcggaatgctgtgaaaaagaaaaccgcacgtttattcatccgtttgacgatcccgatgtcatggccggacagggaacggctgccatcgaaattttaaatgacattgacgtcgaaccgcattttctttttgcaagcgtagggggaggaggactcctgtccgggatcggcacgtacatgaaaaacatctcgccggatacaaaaatcatagcggtagagccgaagggcgcagcctcctattttgaatcgaaaaaagccggacaagtggttgaacttgagaaaattgataaatttgtcgatggggcggccgtaaaaaaaatcggcgctgaaacctttcaaacgctcgaaaccgtcgtcgatgacgttttgcttgtcccggaaggaaaagtgtgcagcacgattcttgaattatataatcaatgcgccatcgtggctgaaccggcgggtgcattgtccgtgtcagcacttgatctgtacaaagaagagattaaagggaaaaacgtcatctgcatggtcagcggagggaataatgacatcggcagaatgcaggagatgaaggagcgctccatgatttacgaggggctgcagcattattttatcgttaatttcccgcaaagggcgggagcgcttcgcgaataccttgatgaggtgctcggtcctgatgatgacatcacccggtttgaatacacgaaaaaaaataacaaaagcagcggccccgcattggtcggcattgagcttaagcatcgggaagattacggcgcgctcattgcccggatgaatcaaaaaggatttcattacgtagaggtgaataaagatcaggatctgttccacctgttaatctgactttttttagaacggccgcgcaaaatgacagacacgctttctcagattgtatataataaaaagaaaacaatcgaaaaagaaggattgatatcttgttactcaaaagcctagagttcaaacgacaggacgggattcaggtaaaagtgacagaaataccggttatcacggaaggtgaacaatatttttttcaaattcatcagcaccttgagctttatttgagagaagtttttgcttcacaaagtgtgagaacagtgtattcattccgacaatatgtcaagcgccgtatgaagtggaaagattatgaggccgttttcagccaagagattttaaaacataacgcataacggtgcacattccttagcgccttccttttgataagggagggtgcgggaatttttttatgatgaacgctgtaagcgttttatctatggggggaatggaaatgaaaaaaatgaaaagcttcgctgccgtcttttgtttgctgctcttgtgcgcctgcggggggaaaacgataaaagacccgctgaactatcagattgagccgttttcatatcagaaccaagacgggaaaacagtgtcactgaaaagcctgaaggggcatgtctggattgccgattttatgtttacaaactgtaatacagtctgtccgccgatgacggcccacatgaccgaactgcaaaaaaaactgaaggctgagaacctggacgtgcggattgtgtcattcagtgtagatcctgaaaatgatacgccgaaacagctgaaagcctttgcttccaaatatccgctttcgcttcgcaactgggattttctgaccggttacagccaaaaggacattgaagattttgcgctgaacagctttaaagcaatcgtcaaaaagccggagggagaggatcaggtcatacatcaaacttctttttatttagtcggacctgacggcaaggtgcttaaagattatgacggcgtgcagaaggttccgtatgatgatatcctctcagatgtcaaagcggctgaggagctcaagtaaactggcagattagacattttcaaaactgaaaaaacatgttacactttccactagtagacggggaaggagcaaccagattgaagctgcgaatgttctcattgatcgccggactggctttgcttttatcagcttgttctgtccagcgcaccggttctgacgctgaagaaccgaaaacgaaagatcatattgtcatagctgcggtcggtgattcattgactgaaggagtaggagatcctgacggttcaggatacgtcggcaagacagcggagtctcttaagaaaaagggacatgtgaaaacggtagatattaaaaattatgcggtgcagggcgacaaaacgtcagacctgctgaaaaagcttgataataaaaaagtgcagaaatcattaaggagcgccgactatatcttttttaccatcggcggcaatgacttaatgaaggtgctccgccagaatatgatgcagctgacggttcagccgttccaaaaggaagagaaaccttttgaaaaacggttcaagacgatcatttcaaaaatccgcaaatataatgaaaacgcagagctggtgtatgtcagcatgtataatccattcacgtttacgctgcctgaattaaaagaaattaatggggttgtgacggattggaacaagatcgccgcaaaagagctggaaaaagatcctcacgccgctgcggtgaatgttgaagacttgttcagtcaaaaaagcggcagcagacggatttcaaaggatgatgattttcatccgaacgcaaaagggtatgcactcatcgccgaccgattatacggcatcatagaaaaacaagggttaccagcagaatagggtgaaatgatgaaaaaatggaaatcgctgttttttgttcttctcgcactcaatgtgattgccgccgcggtaattgtgacattattggttatgccgggagaacaggcgaaaatacaagatcagacaaaaagtgagtacggctttcatatcacaagctccaaagaatcacttgccaggtttgtgaattcgtacttaaaagagaaggcatcgaatcagcttgactacaaagtggacatcaataacgatgtgcacgtggcaggtaaaatcaaagcattctcaacctccattaacgcggtcgtcacatttgaaccgtccgtacaggagaacggagatgtggttttgaaagtgacgaagttttcattaggtgaattaagcctgccaatcagctttgtgctgaattatatggacagcttttatgaactcccgtcatttgtgcacgttcattccggggataaaagcatcgagatccgtctgtcagaaatgcctttagacaacggcatgtatgtaaaagcggataaaatcaatctcgacacggatgaaattgaattttcctattatcatccgaaacaataagttttcataaaaaaaacacagatcctttcagggatttgtgtttttttgtgtcagcgttttttgtctagcttgctgaacagtttgattaacgttgcaagctcttcatcagagtagcagtcaaaccgtttaaaaaagtattctgtttttttctggttgaaatgatcgacaattttctccccggcttccgtaatatggattctgataattcgcctgtcctctttagaacggatgcgggtgatccattccttttctactaaagcatcggtcactgcggtaatgtggcttgcggagacctcaagaatgggggcaaattccgttacttttttaggcccttgttcactgagaatccgcaaaatggtgaattcgttcctggacagctctttatctagaatttcattaacttcatttctgatttgtttaaacacttttcgaagcaaagcttccatatcatacatcatttgtgtccttactttcaaatcatgaacctccaatatgtagtcagcgtggcattcgttcagcttctcctgagagcagaattatttttattctgtttatacatgctataatataataataccacgtatgaacaaaggagggcacccgtatgtcagaaaaaaaagaaatcgccacatttgcaggcggctgtttttggtgcatggtgaagccgtttgacgaacagcccgggattgaaaaggtggtgtccggctatacaggaggtcatactgagaatccgacttacgaagaagtgtgcagtgaaacgaccggacacagagaagccgttcaaatcacatttcaacctgacatttatccgtatgaaaagcttgtcgagctgttttggcagcagatcgacccgactgatgcaggcggccagtttgcagaccgcggaagttcatatcgggcggcgatatattaccataatgatgaacaaaaacaaatcgctgaagcctcaaaaaaacagcttgcagaaagcggcatatttaaaaagccgatcgtcacagacattttaaaggctgagcctttttatgaagcggaaggctatcatcagcacttttataagaaaaatcctgatcactacgggcgctaccgtgtaggttccggacgtcaaggctttctggatgagcattggagggacagataagatggcttttaataaagaagaaaaaatcaaatcattaaaccgcatgcaatatgaagtcacgcaaaacaacggaacggagccgccgtttcaaaatgaattctgggatcacaaagaagaggggctgtatgttgatatcgtatcaggaaagcccttgtttacatctctggataaattcgattctcattgcggctggcccagttttacaaaaccgattgaggaagaagaggttgacgaaaaactggacacaagccacgggatgatccggacggaagtgagaagcaaaacagcggactcccacttaggccacgtatttaatgacggcccggggccaagcggtctccgttattgcattaactctgcggcactccggtttattccgaaagacaagctgaaggaagagggctatgaagcctgcctgcatttatttgaaaaatagagctcagcaatgaggcctgcctatcagacaggccttttttctatgtttttttttcttcatgtaatcgttcaataatctttacgattgtttcttttgtgatgagcggcgcctgatccgattgatatctggggagattgaccttccgaaattccggatgtttggcgggatccggcaatatcgcgtaaagattgccccattcatataaagattccgtctcatgaggagaggtcagttcttcatgaagcttctcaccggggcgttttcccacttcaacagcggctggctgcggcagtccgtgccggaacgcatattcttcaaacccgtgaagcagttcttcaagcctcagggactccattttaaaaataaacgtttctccgccctttgtaatcgccgcagattgcagggtgagcgttgcggcgtcatcgatcgacataaaaaacctcgtcatgtttttatccgtaatggtgagcggaccgcctgccatcaactgctcaaataaaataggaataacggaaccgcgtgaaccgagcacattgccgaagcggaccgaacaaaacaccgtaccgcggttttgaacatgatgattcgcctgatgaaacagcttctcggacaacagcttcgtagctcccattgtgtttaccggggaaacggctttatcggttttttaagacatttactgcattttgaggaactatcagtggcggtgagatcgaaagcgtaaaattaaacttcaggataggggtgatttcaaactgagccggaattggcccttttcttttttgtgtcatcgtaacgataacttctttgaagaccattcttaatagcgagttctttttttctgtgcttgtttcaatgtgatattgatcaattatcttatttatgttgtttctgactgtattactgtctatttctgattgcgcttcttgagttccattgagttcatgcttggcaatctggagttctttaaattcttcatctaaaacagcttttcttttcaaaaaaagttcatcagtgtaaatgccgctttcatatttctcgaagataaaattctctttgttttttaactcttgttctttttgtgaaagatgttcagacatttgcttctttgttttcacattactatttacgtcttcgtatttagaaatcatataaatgatatgttttgttaaagtcttattatctaagttgcttaaagaagagaggtaatccagaatggcattttcaacatcgttatatctcacataagtgcatttattctttttgcaagtgagtgatttaacgtgatacacactttccgtgccgtttttgttttctcgcgttcgcctagtttcgtatttagataatggttcaccgcacttagaacaagtgcatacgcctgccaattcacttaattccaatgcgtttttattaggcagcaggggaactttgtttgcaattttctcttgtgattgttgaaattgttcttgatctattatagggacgtgtgcatccgatactataatttgttccttttcaggtctaattgttcgtttaccgtcttttgttttttccctaaccttatatttaacagttccgatatacgcttcgttttgcagaattgctttaattgtgtattgattccagcgcttttttcctgatggagtcggtatttgtaattttgttaagtgagaagcaatcgctgtataactaacttcttttccattcaacccatttaaaaagatgttaaagatgaattgaacgacttttgctttttcttcgactgggactagtttggatgtttttttgtttaaccggtatccataaggcgctagtcctgaaatccatttcccttgtgccgcatatgtgtatttagcgcctgtcatacgctctctggtcatttcaaattcttctctggccataaacaattcaaaacgaatctgacgcatgtctgcaggatttcgagggtcataaactttatatggtgtaatgataatcaatcgcttactttgaagaaggttaacaatttgtcccgcatcactgtagctcccgcggctgagtcttgttatttctttaacagcaattgcctggtacttgccttcctcgaggtctttaagacattctttaaaaacagggcgaccctcaatgctttctccagatccgatttccatttttaattcataggggatttcaatcgacttcagtattttattcatgagttcattttgttctgttagcgtatcttcgcctgttcttttttcccgctccatatcctgacgagagcgtctgagataacccaaaatatttgtaatgttgtaagaatgaacgatgttttttaactccaaaaaaacagcacctcctctttattgtatttactgtaaaaacagaagtattcgtacaatattctgtctgacattgaatacgagaataacctaaattctgaagatgaaacttttctcgtccagttgtcaggtgcattttgtaattatgaaaatgataaagcgaaagaaatgaataaacaactattcattaaccgatacggtgaagagcttggaattagctccattaaaggagataatcgatcagaatatgaagaaattattcgtacttatgaaaagaataattacaagcagaaagaaattaatatagatgagctgctgcaggcattatttgagacagagatgatgttatctttaaaagaaaagttttgataaaatcctaattgatgtatcataggggtttaatcagccactataggccacagagtccctcacacgctctgtggttttttgtttagattgaatgtaccaaataaaaaagaagcctcagaggacttcaaactggctctacggataggatagtaattaaaacagcaaataacacttacattttgttcaccacaagtgctgcttcaattatgaataaaattgttactgattaacaaattcgtatcctcagtaattattctgaggagtatgggggtgtttttattgactaactttgtccataagactatcaatggtttgaaaagtcttttagatgaaaaaggggctattaaattgttttgttctgagggatatattgtagagagccttgtgactttttctccaaacaaagcgtctcttagtgaaatccaaaactttcagtcgaatcataaattcactcttcctgatgattacctgaagtttatttctcagcataatggtgcgaaaattttcgaaattctttcagagggcgagaatattggaggaggtcttcatctatttagccttgaagaaatagaagaagaactaaaatacgagcttttgtttgaaggtatcaatggaatacctgtggctacctgttggaagaatgtcatttaatgatcgacaaggatagagtgaatcaaggtgatcctaattatctatttatatttgaaagtggttcagaatataatccattaaatttaaactttgaaatatttttagaccgatatattatgtcgaacggggatgctttttgggactggaaatactatacagctgaaaattattacaggacgagataaaactgtgtatgacagtcggaacggactgtctttttctgttaatcaaataataaagctatggtaaaatttagacagaaagaagcagaaaggagacgtaaatgaaagtatttgaagcatcctcgttaatttcagtagcggagaaacgggcaaaagaatacgatcagattagagaacaatttatcaatctcagaaaagcgtttcagggaatggctgatttagatgacaatgagttttcgggcaaaggtgctgataacatcaaggcattctttcaagatcacgcaggtgttacagacagctggcttgatctgatcgatatgaagattgcttttcttaacagtatttctggaaaagtatctgatgccggattgaccgattcgtttgtggaagagtcatttttagaacatgaactgattaatgcgaagaataaatcaaaagctatcatgcaggagcagcggaatgaaatgagggatattcttaatgagataagcgatattgttcatcttgatgttttctcgacagaggatgtcgatcaaaagctggattcagcagataagaaacgggacaataccgtacacaagctcggaaagctcgatcatgatctaacgaaggaatacgcagaaaccgaagcgaacgagaatttcatccaagcagactttcaacagctccaaaatgccacgggtaaagggaaaaacgcaacaccacttcactataacgtcaaggcgtacagagaaagtgtcatacataagaaaaaaggcgagattgcaagacattcagatgcttatttgacgattaaaaaagaagaagcgaaagagcgagaaatcaaggatctgaagaaaaagctctctgatggagtaactgatcctgatgaatacttggagattgccaagaagatcggttacgagaaccttgaaccttcccaacaacaatatgtgatgcagcttgaacaagcaaaacagatggaagaagccggagaagtgacctgggatattttaaaaggagccggcgtcggcctttatgatgtcgggaaagacacggtaaccggtttgtggcagctgatcagcaagcctgatgaagttgttgaaggtatcataggggcagttgcccatccaattaacacgtataatgccatttcaacagctattgaggaatcgtatcaaaaagatatggtgaacggggatgcttactccagatcaagatgggtgacatatgcggtcggttcagtggctgtggctgtcgtcggaacaaaaggcgcaggagccgttaacaaagctgatgcggcggggaaggtcataaacaaggcaggacaggcaggtcagaaaattaaggacattaagatttcagatttgcttccttataacactaagtatgatcttgctctggctgataacgtaccatacaatgtggttaacagccaaaaccttaaaaatggacttttgtccagtgcaaagaaattggatgaaagcagaaagccatttactggtcagaaagtaaatgtcccttggttaaataaagagaagtatgaggcctatgaaatagacggcaaggtaaaagttaaaggagagcctagagatgtaagccgtagagtatacacaatgaaagatattgaccttaatcaaaaaaatcgtaaaggctttacgaatcttcaactgatgaaaaatggtaatgctccgtttgctaaagatggcacgcaaataaatttacatcacttaattcaagaagagcctggtactatgctggagatacctgaaagctggcataataagtacagtgatgttttgcatggattaaaagggaatggacagagttttagaaatgatcctgtgcttgataaacaatataaaagtttcagaagaaggtattggagatggagagctcagcaatttgagaatcaagaataagaggtgaaagtttaatggattattcgaaaataaaaactttctttgatgaaaataaagaaaattcaattctcacggggggagtcactgaagatcagattagagaaatagaagaggagctcaatgtaactcttccagacagctataaatggtttttaactgagtatggttcagggggagcatacggaacaatgattctcggatatgactctcacggcgctgaagttgtcgagcagaccaatgaatataaaaaatattataacctttccgatggtcttgtagtgatcgaatatgtagatgaattttcttattgtcttgacactaacaagatgatagatggagaatgcccagtcattctttgggataaccaagagggatatggtaaacaagttgctaggacattccaagagtttttaatagaagagcttgaagaatcgaaagacgactggatcgatgatgaggactgggacgattaaaactaaaaagaaggtctatatctgtttttccatagcatatgaaggagtattaaaatgagcttcactaagatcaaacaaaagttgaaagagtttacgattaatgctggcacagatcctagcattaatacaaacgagcagctcaaagaaattgaaagaaatataggtaatcaattgccttccgactataaggattttttgaagggatatggaggctgttatttagaaagtaaaaaaacaacagatgaggttgagtatgacgtttgctacaaacctatagagaaagatccttggatgggtcaggaagatgatacacaattaatagagagcttctatggtttagctaacgatcataacagtctccaagaagcaatcaatacttattctgatcgctttcccaggaacattattcctatagcaagctcggcaggtgggaatgaaatatgcatggatatcgataatgaaaagatattgttttgggatcatgaattaagtcaccccgataaagactttttccttattgccaactcttttgaagagtttattctaagtttagtagatgaaccaattgaaactgataataatgacagtgatgtggaaattgaggttttagacaatgactttgcaaaattgctctttggtaaggacaattagcttttattgttaggaaaagtattgcaaagttaagctctcagaaagagagcttttttattttcgatagaaactaattataaaaagggagagaggttatggattcgtaccaagtaaagaaattaaaacccgaagaataccataagtgtaataatatttgggacatggaaaagaaaaagaaaatggctaaggtgttttatgacgaattagtaagcggaaacagaattacttttatttactcagtgaatgacgagtttataggagaaggatcgttagtttttcaaaacaatgacccagattataccattccggataaacgcatttatctgtctcgtatgattgttaaagaaggatattgaaattgcgggataggcggtattattgttgattatttgattgattatgctaaacaacttggatttgaggaaataacattcggtgtagatacagataacttaaacgcaagacatctatatgaaaagaagggctttacaaccgtattatttcttggtgaagatgaatatgtaaaactccttaaagtattaaaataaaattcccgagaattatggtgaatgtgtgggaggttactttcacaaacgatgatagacggtaacttaagctaatctaattcgttattaagatacggattagcatttatcctctcaaaaccaacccgtaatgaactaggatactgttggctgaggaattatttttccatgtattgtattttatggtattcttgaaatgaaaggaggagacaatgaaaaagaaattaattggggtcttgatcattgtttgtttttctgtgttcatgtatggcgcagttacacattcttttaaaaatcaaaaatccactgaggaagtattagaaagtgcatgggatgaatttggcttatttagccttggaattggagaaacagacccagtcatatcaattggtatggataaaacaaaaaatgaagaagaattacgacgctatctaaacgataacttatctaaggaagttaaagaagaatataaagttgagatcattaaaaaggatattaaggttttagaaagacaacatgagaagtatttggaaagtaataaagcgcattgatacattaaagatgcttatcggctccaaatacaataatgattttatccaataaacaaaagttttgcaaaccattccaatggtttcatttaatctgttataatcaatctgtaaaatacagactggttatagtgtatttctttaacaagaaatgcataaaataaaaagagcatggtgttggtcgcaacccatcaaagggcttgctcagatgttatgttattcatgatagacctaacccttcaggttatcaggctcaagggaggtctattttttatttatatacgtcaacagggcgattataaacgacccaaatgcaagcattcacattaatgcctgaaatgttgacataagcatcaccccctttctatagggggtgagcaagactccaagactccaagattcccttaagtgagcatacttaatgtacaggaatcatttatatgtcgttaaaaacccattcagttacctatgcgaaaagaaccatgttagaatcaggttcttttttgaatttgagttaaataatcggctggaattaccgataaataacatgtgaaataataccaaggaggttaagggattgaaaaaagtacttagtttagtaacaattacacttcttgctgttacaacgatgttttccattagcacatcgaaagcaaaagcaattgaagcaacaccgctttacagtcttcagattctttccgtcacatcggatggaaacgactttgtatgggagcctgttacaagcagcaagccaaatgcaacaaatgttttgaaaggtgacaagctgcatattaaagttcgctttatgggctatacaaattcgaccgtcattaaagcaaaggatgggagaaatttgttatacaaaggtgaagcgaacatatacaaatatgaccctatacttggacaaaacaaagttgtgataggatgggacaaatacattgaaattccaatgaacgaacttccttcaaatgagattcaagttgaaggtcttgggaaaaacatgaaaatcatttatagcaacgttgtaaaattcgagagaggatgaatgttatggaaggtctaaataactcttacaatatcacgaaagatccgaaatttttagcgttttgcagtttagcgacagaaggtgcaggaattagttcgaatacgcaatgttcaattggttttaatgaattcaaagaagcgctggagaatggcaaagtagttgataataaaaaccttaaaagcagttcagagttaaatcaccagtttgattactggaagtccagaataactgggggacgagctgtaactgaaactgataatcaagtgttagatatcatcaaacaagcatacaatcttggaatggttacgaaagataatatgcttttgagaaatcaagccattaacgcgtataaaacatctatttaatttaaaattaaagccccttattcaggaaggggcttttgctttgcaacttattctttatgtttaatctaaaaccataaagtcctgcacttttgtttcttcttcaggcaaatcaaattcattaagtttctttttagtacggatatcaaaaatccccatatagccaccaatcccttttttgttttcctcttgtgaaattacataaagtttttgatctttaaactttgcattcatatacggaaattttaaatcgaatttttcaaaagaaaaatctttatcgtactcaagtaagcaggcgtatacggatttattaatatatgtaacgtaaaatttaccgctttttttgtcgtaatacacagcgtccgcttgttcgagatcatcaggatattttatgaattttgatttccatgatcctttttcgattacagttagttcatgttctgagctagctacaacatatttttcagagtgatcaaatacatctccataggaagctaatccaatcgttttaataatcccttctgtgtttctatcaatgacgtacatagacattccttgaatgacgtaaatatacctattatcgcttcctcccatggttacgagggtaggcaaagtcaggctatattttttattgaactttttatcatttactttcagttcatttccattggtgtcgacattataggcttttacagaaatatcttctccttgataccaaaaagcaaatggattggataatttatgttctttaatagtgttgttttttaatgtgtaataatatggttcatgttcagctaacaagacgatatcgtctgaagagggggtttttttctggatatatggtatatccggtaccttaaagtatcgtttattgaatttttctccttgtgatgtggatatgagtacgcttttcttgatgagtggatttgaatagataaaaaagattttatcctcggttggatttattttagaagtacttacagagtgttcacctttatttataaagaatgcattgatcaacaatataactattgcaccaattagaactcctgaaatcccatataaaacataagactttttcatataacgctccatatcttttatataaaaaaacacacttgcagaataaatctgcaaagtaaatgattaggagcagacagtttttgatgagcggtcaatatccagatgtgacaagtgcttctccattactgtttaggtctgttccttttgtgtttttgtatgattgccacacaagtttagaggagcaatactatttatttgtgctttttttggttgcagctatgaataaggcttacctgttttactatgaaggacagcattgcatagagctttacaggtgaacacagatcataaaaaaacaccccctatgcgggagtgccaaaacatttatgcggtttgccctctacgttccactgagaagtcattatggtgatcaagcgcgatatggatactggctgtgtggcctcttcgggcttctttaaaaactttgtggccgtcaagaagataatgtccaacaagcccaagtaagataactaaaaagataaaagccgatgcaaatttaaatttcataaagacaatcccctctctgaatttgttttcgggcataaagcactttctcataaaaggctgtagctactttatggtcttcatttacattataatacattgctgcatcagtcgctaggtcttccacatccgaaagcatagcttttgattctaagtaatctaagattttaaaaagtcgttctttgtcattctcaacgaataaacccataagaaaatcaaacatttttcctaatacgtcatcgttcaactcctttgaaagcataagaccttgttcacaaacctgttttccatcgaccgtgttgaataatttaaagtgcgtttttgccaacattagaagtatgtcaagcagtcggctagaattgtgaagagaattactttgataaattgagacgccttctttaaaatactccaatgccttctccatatgtcctgttgtaaatgagcataaaccgagattgtacaaagaagaacctattaaccgcggcatatcaatttcttgtgcttgttttaatgcattcatgaaatgcggtattgctttttctggatactccatgtctaaataattcagaccgatgacgaatgaacattggattactcttattgagtatgtctcgtgtgctttgtaggtttctattgcttgaacaatatgatgcatagacatgtgggtttgcttcatgtgatagtacacttcagcaactttgtagtgaaattcagctcgctctatttcatcggggacaatagatatcttcttttcagctcggttgtaaaaacttattgctttaagatattcgtactgttcaaattcatacatcccatgaaaaaagttaaaataatattcaagaattccttttagatcgctttgtttactttcgatctcttctgataagtctgaaattttaggtcgttcttcattcatggtttttggttcaagataatcaagcattaattgatgtcgaaaacacatgagcgaatagtacaacaataaatcttgatcttcttccatatgctctatttcttgttcaacttcaccctttagaatttctgcatctgcaacactgaataatcttatgtatttgtaccatttattgatttttaagccaacctttgaagaagagatcaattgctccaaaaaaatcaccctcctagtatttcgactgattatgtaatattttatcataatgtaatatattaggaagagtgttttttcttaatttctcaatttggtgtggaatgcgatagaagccccctcgttcgagaaggggatatgatcaatttcctgttgctttcagtgaggcaagccactcatctaatgttccggagaagccttgttgaacggctaattcatatgctgattttccatctttaccggcagcgctagtagcttcagtactgcctttttcaccttttttttaatgaagctaaccattcaaaagtgatgaatattcaaggcgggagtaaggaaaattaacaaaaaatgtgagggaatttagatgaaacgatttattttggttatacctttattggctgctgttattgtctctccaactcaaatgaaagcaagtccaatgccttgtagtgcagtactcgaaccggtgaatcaaaaattgaaaaatgcgaagggtgcggcactaatctataaagtgcagttatacccgccaagtgctgcgagaacgaatatgagtattcttgctgtccaccttcctcagccatcttcttatggaagctacgacggttatgaaggatttgcctccaaaacaggggagatcagttggcgatttaaactatatccgactcccgagggagagagtcctaattgggctggaaggattgattccatatcagctgaagtgacaaatgttcaagtgcaagtacgcctttcaaattctaagacgcaaaagttggggccgagtgtattaacaaataatattcaatcttgctattagaaatgtagagctcttatcaaagaaagaaatgcgactggatcttttgaaaaaattctggtgaaaaatgaagaagagtccattaaggcggagtccaatgaatgatgaggaattaagaatcattctgaaatcaattcatcattgacagaacagagccggcaaaagtcgatattgcgtttgattttgtacaagaaagacggcataaaaagaaatggttagctaaaaaaaggcaaagagtcaacgctctttaccatcaggtgttttccttaagcggtctgcaatatgcttaattaaactcagcgcagcagtcactaatccaataactaaagcaatctcaagtaagaggataattccaaaatttaaaccgagactttcaaagtaatcaccagtaaaagagagcaattgataaatcccaagcatcagcacaataaaggaagcgcctataatcgccagagactttttagagaactccttagtatggttaaaattataaaccaataagaacaaaaatagacaagccatggcgatcttatgagtcaatgaatcacttgctgaaaacccttgcacaagtaaggagataattaatccggtcattccgattattttgttcaatatatcacctgctttgtataagtatgacttagatgtcagcttaccaattaaaggtgaaattctcaacataatgcagtttaaagttaacttaaaatgtgattattttaagaaagaggttgaaatatactcgattgtcaaaaaggggagcaagtaaggtctttgagaatggagaaatgggaattatattgtggacgacaaatcgaggttctgtaggtgttgaatgggactctggtgaatatggtgaatacaatgataaagtcgatgagctatttgttagcagattaatatgttttccgaaagttagacgaaagcagttcattaaaggaagggttagacaatgattaaaataacgctattccaagatgaatattgcaatggtgaatgggttgaaattgataggctattaaatatatttataagaacagagtcaattaatattgaagttattgatatcaaatacaattcactaaatactgtgcgaactcaaatacactctgcgtatatatagagaaaggacttaagatcactaggaccgaagatgaaatcgtgattttaaacgtagtaagaggaagaaatgaaaacctatgtagcaaccaaggaaactgagtactttaccaatgaatccattgaagaggtgctttatgctggtacaataaagaagctgcgtttagcaaaattgatggcacttcaggcaatagactaattttagatgtttgttttgatggcttgaggattaaatcttttatcaaaattcataatggtgttggcgagtagcttttgataaattggccagcgcaaagaaagaggttgaagactacaatgccaaactaattgaggcaggcacaatctctttgaaatgttggagagagctggacaagtctagataaaagatagtttttattcaaatactcaaggcagagcctatcgcacctacaatgccaacaaaatcaactagtgttgttacgttgctcataaagtcaaaagaattgtttattagaaacataaaatcagcccctgtgaaaaaatttaacactaagataaaaaataataagaagaaggattttatcactggcttgttttttgtgtaggagcagccttgaatattcgattgtattactaatatatcaaaatttctacaattaatccaattctctcttacgatagtttttaacgaatacaaaaaagccccacgaatggagctgctagattacgtattattgaacatagccagaaaagtcgctcggagcagagaaagatagatagtaaagcgcattggcatctagattttttattgttcctgtagctgtaccgttagcatttacagttagtgtttcagtagcaaaaatccagtcggaatcattccaaactttcacagttagtttagttccaatattatttgtaattgaatagcttatcgaagatttgccttgaaaataactgtttgaatataacgtattgccagttgcttgtccagcgaatgtcaatttgtttttcgtaagatttacaacgctatttgaattaggagggttaagaccaaaagctttaaattcactttcgacagagttagtaagcttagttgaaaacctagaattgtcggtctcagcagatgcggcagtggcaatgctcagagaaagaatggccaccatggtgcaaacaataaaactaaacaactttttcaaattaaacactcctttatttgtaagttaaagtaaataataacatttaatttcaggaggtcaatgggtttattcaaactggaatgaatctgtcacaaaatatgaagagcattttggtgaattacagctaaacgatttggataacttattgtattatgtactgaattttcagtctgttttgctaagcattaaggagttatgtaatagagagattatactctccaagattcaaaggaaggtatgcggagtttaccatgtagtcttaaatctataatcactttcagccagctataagaatgtttattaatcccatatggagagttagctttattaatacgacgattccttcaagatgcttttcattggcagattaaagtaagctaatccgtttccctgcagaccttcaataacaaatacattgttatggtcaaggttaatgtctaaaagcatgcttttccgttcagtgagcgggttattagcaattgaatgccaattaatataaattatatcgactacacagtaaacgatattataggcagattttttagacataaagcgtcccattacagtctcaaagtcaggaagcaaaaacaacagtaccattgagcatatcaagattcgagatttctcaacttgcttgttactttattgttgtaaacgagtataaagctggaaggttcagtgtagctttaggagccgaattgcttagagaaagcactgtatgaagagggattttaattaaataaagcagacattaagcctgctttatctttttgaacattattccttttttatatgaattaatgttctcaccaaatgcccgtccttaagattttaaattctgggcacggtcagactttttagggaaaatacattctaacaaaagaaaaaataaagttaatcctaatgataatttaaaattgtcgctgttcccaatggaacataagatacccactatataaataaataaaaacctaaacaacgaggcaaatataaacttgaagaagttatccccaatgagatgccttccaacagccacaaaaatattatcaaaagtaaaagaataaacaaccatacacacacttgttataacaatctgtttaaattctatttctaattcaaagaattttacaagcacatttgctgatcctgttgcaaataagattatcaccattatgattgcagtaggaatgagtgataaaaccaaagctcctattactgtagataataaaaatttttcatttgtgtttttttctgcagcttctttcttttctcctctgtacataaaaataaaaaagacgatgagagataaaagataaattgataacgtcataacaagcagattcatggtaatctctccttacctaattaaaacaaaagagtgaaggttgtaagcctcactctcttgtttttaatgtatagttataccaaaaagaacacaacaaccttcgcaattaactgtgcatcagctaatggaattccggctttcactaaggccacagtaacagctgtttctccgaaatttgtaagttcatctataacgtccgccgctttgtgtccccacttagaacaagcatcaccagctttttgtgcccatttatatgggatctttttaataaggtttcctaaagcggggccaccaaccctaagtgcttttactaatatttgtttagcgaaaggaatgccctgtgtatgtacttcaggatttgaagctaaaggagcctgtacgctattttgaactacaggtgcttttttactttctgctgcacttgcatagccaggagaaacaactgatatagccagcacagccaacgtgaacaccatgataaatgaaataagttttttcttcatttcttcaccatccttaaataaccattagtttaatatatttacaaatataatggatatttgtaatgaaatcaatatattacctaaaaaattttagttataaaagaaggaacaagaattttaaaaacatacttttgttattatacgagacacaattttcttaaaaaagaaccgaaagtctcattggggatgcccattttatgccgtggagaagattcaataaaactgtaggtttaacaaaaacaaatattttcaggagtgtaatatcataaaacactcagagggggaattaggtttaagaaacaccattggcaagattgaaattgttggaattttactggagtggtttgctttatgattttggggcaggagttaaggcgaaaagagataactcagacttggaatgatactgaaagcaacgtctacgatcaactttgacaaatactcaactgctgctgtcgttcaaacattaggatttgcttttaatttgcctacagggggctggtcatctgatttagctggattagctaataatgatcattctaggtgaatataaaattgtttacttttaggataagcaggaatgtaagatggcagggacggctcttatgacaaaacaccttgtaacgatttatgaagataaggatcaaaagaaaaaatcgggagtgacagctttatcatcacagacaaaggcggcccaaaagttgctgcaatgtgataaaaaataaccctgtcttaggcgggggattattacatgctgtttattatgctgtaaacaaacgcaacaataaataatggataagagataatagcaattagttttgaagatttgctctttttttcaaatgtgtatattagtgcaaatcctaaaaagaatattgtgacaaaccaagaagaataggacgggtacaatgcaataagtaagacaataagagtggataacgcaaaagaagagtcaagtgttattttctgatcgtttttcaaataaaccgcctccttacacatattccacattagatcgcttaaagaaggtgttgtggttgatcagccaattaaatatttcatgatgcaattgtgcggttctatgatggtaaagacctcgccgtgttccataagactacggggaagttgttaaaatccttaaaaatgagtcgttttagtctgtcatttcctaaaacagtgttttactcttgttacaaatatgcaagaagggcggtttgaacttgtatagattatgtacaatgctgttaattttgttaagtataacattagggtgtcaaaacccaaagcaaacattttatggaggctgagcaaaccatggtcggctatgtcattttaaaaggagagaatcaagcaattttcatacataatgaaaaagctaatgttaaagactatgaaaatcttagtgaaaaagagattattaaaaagtatagatcggatatagttttactgggacttagtcaacttaacaataaagatgacttgagcaaaggacaaaaaattcgtatttggtataaaagattcaatgaatcttcaccgccaaaaacaaatatctcaaagtttgaaagtatttagtatttattctttgattcccagaaaaccgctgcaaaactgaagcggcatattgaaccgaaataatgtcttcaaacctcacgtcattcttcattcgcggtggcttattcctgccccaggatttatttgacaattgttgactcaggtgcagagaaggcatatgtcaagaacacattttgaattactgggcaccttgaataaagccagcattcccatattcatatgcgaagagatcggtactgaacgctggatcatacatttgaacaagcttgcgaggctttgataaagaaagaacagtcaagagacgaaccattacatacatataatactcctgtgaaagcgggggtgtagttttggaaccttaccaacgttatgaggaattaaagaaaaaaacaataaaggttgtccataaagataattacagtatccgctatatagatcaggatgaagcgagtaatgacttagatgaattttataaacaatttgctcagcatttattggaggctgctttggaaaggagtgcagagtaagcttctttttttgatttgtttgtggtaagtatcttaataaacggctttatcagtactgatattaatcacatgcgtcacttcttgcagcaaagccgcttctgcgacattttgtccgccgataaggttggtttgaatggcttcaaagggattatcctcacatgtcggaacctgcttcagcgcagctgtgtgaaagacaatatcaacacctttcatcacttggttgactcttctgtagtcacgaacatcgccgagcacaaacgacagtctttgttcatccgcgtatttttgcttcatcacatattgtttactgtcatctttgctgaacacaatgacttctttaggggttaagagcaaaaggcgttttactatttggcttccgattgatcctgttccgcctgtgacgagaacagttttatcgtgaaaaaacggttgtagctctactgcttgctgtttaggcatggcttatcctccaactctcgtttctctaccatgcatcatatgttgaacaatttcagcgagttaatgaaagaaaccaataaatcaaaaattagagaaaaacattaatctgatgcgctttcatatcgcgttacccgattaatagaatagaaattacaaataaaacattgtactaaatattcattttaaatatttgctcacgtcaattttttctcttcataaatcctcacattcggacaatcttcacaaaaacttaacactgaacttcctgtatgtattttacaattaaagtgcacgttcataaaaggaggatggaaaatgaatcattcaaaaacacttttgttaaccgcggcagccggattgatgctcacatgcggtgcggtttcttcccaggccaaacataagctgtctgatccttatcattttaccgtgaatgcggcggcggaaacggagccggttgatacagccggtgatgcagctgatgatcctgcgatttggctggaccccaagaatcctcagaacagcaaattgatcacaaccaataaaaaatcaggcttagtcgtgtacagcctagagggaaagatgcttcattcctatcataccgggaagctgaacaatgttgatatccgttatgattttccgttgaacggaaaaaaagtcgatattgcggcggcatccaatcggtctgaaggaaagaataccattgagatttacgccattgacgggaaaaacggcacattacaaagcattacggatccaaaccgcccgattgcatcagcaattgatgaagtatacggtttcagcttgtaccacagtcaaaaaacaggaaaatattacgcgatggtgacagggaaagaaggcgaatttgaacaatacgaattaaatgcggataaaaatggatacatatccggcaaaaaggtaagggcgtttaaaatgaattctcagacagaagggatggcagcagacgatgaatacggcagtctttatatcgcagaagaagatgaggccatctggaagttcagcgctgagccggacggcggcagtaacggaacggttatcgatcgtgccgatggcaggcatttaacccctgatattgaaggactgacgatttactacgctgctgacgggaaaggttatctgcttgcctcaagccagggtaacagcagctacgcgatttatgaaagacagggacagaacaaatatgttgcggactttcagataacagacgggcctgaaacagacggcacaagcgatacagacggaattgacgttctgggtttcgggctggggcctgagtatccgttcggcctttttgtcgcacaggacggagagaatatagatcacggccaaaaggccaatcaaaattttaaaatggtgccatgggaaagaatcgctgataaaatcggctttcatccgcaggtcaataaacaggttgacccgagaaaactgactgacagaagcggaaaataaacatgaaaaaagcagcttatccaagctgctttttgatgtgaagagcgtttcatgagaaagtcttggaacggatagccgtaagcacagccggcagccggtcatacgtgtacgccggtactgtctcttgataattaagcgccgcgatttgtttacgttcacccgggtttgtcatataaaaatggatcttatccgcaaaatccgcaaacccgctgtaagaaacaaatgttgaaaacgggggcgcgggagaaaggtctgtcagctgaaaggcctgacaagccgcaatgtctaagcttctcgtatttaaactggtattttcgatgccgcgtccgttctgattgagcgcaaaccgataagaacggtgagggtttaagaccacctctgcgctgttgtaatataatgcggcaagttcgggttcaatccattcatccattacgagcacattttgctgtctggcgatttttttaggcagatgtctgcgccatcccttcccgataatacgaagcgtatacggaagcttcgccgctgctttcaccagttcaacgcggttcggatacgggtatccgatcagaagcagatttgtgtgaagagaggcttcagcaggttgttttttaaaaagccgctgattaacggggatcgggacataatatacgtgctgtaagcccatttgccggtaagcatcaagcgcgttttgttctatcgttaaaacggcatccgcaagcggcgcgattgtcatactcacatcgaaataaaaaggatcctccgtcatccatagatatacgggaatctgttctgtcttcagccattgaagccattcagacggaatacggtctcccgtcatcatcagactgatgtctggtttgaatgcccgtatactgcggatggtatcttcctcaaactcagaaacagaaaaaaagcggacggaagactgtaaaaagccttcctcgatccagcggtcaaaatacgtgtatatgcctttatatcctgaacggatatataaaacgttcatatgctgttacgaagtgaacgtgacactttcaactttgtcgacgtcaagcaatgttgtagcagagcctgccggtgtaacggaattttcctgcgtaacaaaaacgattccgtgaatttcgtcaaaggcaacaaattgaaccgggccgatcatgtctcctgaatccatcacaatgctgatgacagtgccgggctgaattcttgcaaaaatccatctcgccgctaatgaaataccgcttcccaatacagattgtgcgctgagactgtctttcgccgctgcttcatccacttttgcatcaattgccgattccaataaatcttttactttgttttccacattatctcctccatctgtgccgccagataaagcgctgttgtcaaatacaggggctaaaagagtttttaataacttctttttaagctccaaacgatcctcgctcatgcggacatacacctcctttacaatttcaacctcacgtttattcatattcctgattgaaaagattggtataagtcgaatgccgttttgcttgcatttttttcaataattaatcaaacagctgaattttcgaatcaggctttgtttgcctatgcggattgtaagagtatgacatacgttgtatagattaaaaaatgaaggagaggaatattttggattcaggagaaactgtaaaacacgggggttttgaggaggaatttcagctcgtactgcttcttcttcttttgttatctcatcagccgtccggagatcattcagatttgcggcgtcagcttgtaatggcaaaagagcttggggttcctgtgtcgcgcgtcaatctgattaacggcagcacactgcagaacgtaattgtcaaagaagtgctgtcagatttggccgtttttcaaaatccgctcaataatacgagatcaaacgtcgcgatttcaagcatcgtcagctggggggctttttaataacgatatcaggctctgtctctttcggagccgttttttacgttttacagaaggggtgatgggatggaaaagaagatctcaattatcttaacgagttacaacaaaccggatcttgtaaaacaggcgattgaaagtgttttgcatcagacctacagcaattgggagctgtttgtgatggatgatcattcaaatgaagaaacctcggccgccatcagtacgtatataaaagatcatcgcatatattatgacaacagttttatcaatccggccgaacggctgaagtcgacccggtatgccgttttgattaatgatgcgctttcacgggccgaaggcgaatacatcacttatttgacagacgacaccgtatttcatccgaataggctcagccgcatggcggaagcgcttaatcaatgcagcgagtttgatgccgtctattccagccagaaggtgatacatgtaaacgggcgcggaacagaacaattccacttctatcgttttgctgaagaggtgcttgatcaggccgcttttctcgttgatcactgttcagtgatgcaccggagatcattgcttgagcgtgtgaaagagaagttcggcagcttttgggacgaagatgttatgcattggaatcacggagactctgttttttggagcaggctcaacacatttacatcatttctgccgataaaagaagtgttggatacgacctataaaacaccccactcatttcagaacacgtatcaatcgcttccgtctgtcctgatcgacggatcctttgtaaaggggacggatcagaaagtatatcagcttgaccgaaataaaaggaagcctgtaaacgagcgctggcatacgttatacgaaggccggaccgtcgtcattccggatccgtttttatttcaatatgaggaagaggactccgccagtattccgaattttcagctcgtcagggatcagtttcatgtttattttatagaagacggggagaaaaggctggttgatcatagcgcatttcgcttttaccgatttaaacggcatggcatcccggctttagaacgggccgaaatacaatcgcttccggacggtccgccgatcagccggtggacatcggactgtgttcaacatttgcccgggaggatgctgtttcgcattgaacggaaattttatgtttatttgagaggggttctccatccgatcagtcatgacgtagcgaaacgattttttgcgaatcagaaggcgatacccatttcctttcagcaaattaaacaattaccaattggaatgccgttctatccggtgtacgatgaaattataagaaatctcaatataacaaaaggttgagagatgcagtcggatgtgcaaggaaaaggagagcttttatgaccgatcaatttgataaaaccgagaagcagtatatagagcttacttccggcattcagaggttcgagcatttcagtgtatatacggacccttttttgccgcagattttttcgcataactttgttcagctgcaccgtacatttccgttagacaaactgctgccgtttctttcgtccgttccgggcatgcttcaagccaattatattcatgtgaaagcgtctccggagcacgcatttccgcttcttctgaaacaaactttggtaaagcagggctgcgtagtggaagatgagctgttttttgcaaggaaactggaaaatggggacctgcaggccggacacccgctcactgcttgggggacggaaaagagcctcgccgatgggtcgtctattatgaacatctatgatgccctttacattggcgaggcggcggccgaacaaaagcttgagcggaaatatcctttgtataaggagggaacggttatgcttgtcgtgtgctacagcgacgcctcgcaaacgattccgatcggctgcggagagcttttcatcaacaaagcagataaaaccgcaaaaatagaagaagtcgcaattctggatcaattccaacgaaaaggctacggatcgatattgatgaatgagctgatggcggcggcaaagctgaacggcatggaaaccgtataccttgtgacgtccgggatggacggtgtaaaccgcttttatgaaaaactcggcttcaaaagatttcggcgcgtgcatacaatttttcattattttcttacatagttgggcattcgcataaaccaattgggagttggcccgcatacaatgccgtatatcgtaagaagaaaggatgatttgcgtatgtacggatacggatatggctacggttgcggcagttttggctatggttacgggcacggcggctgcggaggcggaaccagcacttttgtgctgatcgtggtattgtttattttattaatcatcgtcggtgcggcttttatttgttagactgaaaaaatcctataatgaaaatcagcctgcagagaacatcattttctgcaggctttttgttatttccatgctgaaaaatcagcttgaaaaacattttaatacatattacctttctggagaagggggagaaaatgtgaacatgacgattgaagaattaccagaatccagaattgcttatttccgaaacgtcggagagtatggcggaaagcaaaacaaagaactgatggagtcatttaaaaactgggcgcaattgaatggtctgcttgattattctgtcattttaggaattccgcaagatcatccgaatcgtactcctaaagagaaatgccgctatgatgtttgtcttgttatcaatcaagaccatgtgcctgaaccagcccggatcggtacattttccggagggaagtacgccgttttcttgcttgatcatacaaaagaggcagtcagcggattttggaacactgttttttctgagatcgaaaaaaataatttatcaatcagagaacagcctattatcgaaaggtatactttacaaaaggtgaatcatcatttgtgtgaaatattgattcccatacagtaaagaagacgggaattttccgccttctgcttatactgattcagatcaaaaatgatgggatgagcagataaatagcagaaccgaagaaagaataaaatcaacaataggaatagaatttccagaacgctcttcaggctgtcgggacatttccggcagcctgttttacagaaaggtattttctgcaaaaaactttctgaaggataagaatgcggttattcatctgttcatacaatgaagcaaatgggttttcgaggtggaaagatatggggagctatttaatcaaaccggagcttgacgcaaattatccgtcagtcagtcatggtaagggatcatatgtgtatgatcaggaggggaacaagtatcttgacggagcatcgggggcggtcacttgcaatatcggccacggcacggaggatattatacaagctttaaaagaacagcttgactccgtttcgtttgtgtatcgctcgcaattcaccagtactccggcggaagaactggctttatttctggccgatcatctgccgggcgggctgaattggtcattttttgtaaacagcggctcagaggcagtcgaaacagcgatgaaaatggccgttcaatattggcaggaaaaagggcaataccaaaaatccgtctttctatcaagatggggaagttaccacggcattactttgggagcgctttcattatcagggttctatgaacggagataccgcttcacccagctgcttgaacggtttccggccgtttcagcgcctaatatgtatcgttcagagctgcagggagaggaatttgtgaaagctgcggcggctgaactggaaacggctgttcagcggatcggttcctcatttatcgcgggatttgtcgcagagccgattgtcggagcagccggggcggccatcactccgccggcaggttattatgaagcgcttgaggttgtctgccgcaggcacggtattttgtttattgcggatgaagtcatgacggggctcgggagaacagggcggatgcttgcttctgagcattgggggattgcccctgatatcgcggtgctcggaaaagggttgggcgccggttacgctccgattgcggcagctgttgcgtctgatgacatcattgaaacgatcaagcggggctccggggtcattatgagcggacatacgtacagtgccaacccatactgtgcaagggcggcgcttgaagtgcttcgctatgtcaagaaacacgagctgcttcggcagtcagaggaaaaaggcgtaatgctgaagcggaaattagaagaaatcaaagaccgcagcggggtgatcggggatgtccgcggtaaaggcctcctgatcggggttgaattcgttaaggataaaacgacgaaggacgttttttcgaaaaaacaggccttcaccgaaaaaatcattaaagcggcaaaaaatcggggcctgcttatttacccagcaaagcccggtattgacagcggagaaggagacgccgtcatcatcgccccgccgttcacgatttcatatgcggagctggatgagctgtcagatctattttcccagtccgcagaagaagctgaaaaaatgatgaagaaggattgagctgatatgtctatttttcataaaaaaatcgatattcatgaagcaattgccgatgtcaaggacgaatctgtcatcatgttcggcggttttgggggagtgggttcacctccgtcattaatcgaagcgattttggaaagcggcgttaaagaattgaccgtcatctgcaatgatgccggatttccggaaataggtatcggtccgcttatcgttcataagcgggtaaaaaggctgatcgcttcccatatcggctcaaatcctgtcgcgggcagacaaatgactgacggagcgcttgaggtggaattttcgccgcaagggacgcttgctgaacggattcgcgcaggcggagcggggctaggcggtattttaactgatatcggcattgataacgcaaccgtttgtgaaaacaaagaaaccgtaacgattgacggaaagtcctatttagttgaaaaagcgctgacggctgatttcgcttttgtgtcggcacatattgctgatgaattcggaaatctgacgtttgacaaaacggcgcgcaacatgaaccctctgatggctgctgcggccgaaagaacatttgctgaggcggcagaaattgtgcctgccggcgaacttgacagcgagcatattgtaacgccgggcgttttcgtggagggtatcgtgcaaagtgaaggagtgaagtggagatgggcttgggaatagcggaaagagagagtatcgcgaggcgggccgccagtgaaattacctcaggtatgattgtcaacctggggatcggcattccttctttagtgccgaactttctgccggccggcatggaggtaatgctgcaggcggaaaacggcgtcctcgggatcggcggtagtccggagcgcggagaggaggatgagcttttatgcaatgcggccggatttcctgtcagtacagttaagggtgcttcctattttgattcagctctgtcttttgccatgatcagaaaagggctgatagatattaccattttaggcgcgctccaagtcagcaggacaggtgatctcgccaattggctcgtgccggggaaaaaggtgcccggaatgggcggggcgatggagcttgcccaaggcgcgaaaaaagtggttgtcgtcatgagccacaccgatcagaaaggccggccgaagctggtcgaaagctgttcattgccgcttacagcagcaggctgtgcagatctcatcattacagagaaagccgtcatcagcatagatgatggggcttttgttcttgaggaactgctgaatggcacgaccatagacgatgtcattcaaacaacggatgccgaaatcagattgggagaatgttttcttaaaagggggtctgtccatggatcaattagaaaagaaagtcactgagtgggcggaagaaaacacagcaaaagcggtaagcctgctgaaacggctgatcggggaaaaaagcacgttcggccatgaatttaacgcacaggcagtcgttttagaaaaactgagacagtttgacatggatattgatgtctgggagccgagtgtcaaacaattgaaagagcatccttattttgtatcggaacgcgaagacttccatgaaagcccgaatatcacagccgtaaagaaaggggccgggggcggaagatcactgatactgaacggacatattgatgttgtcccggaaggaaatcccgccgcatggacgtatgaaccgtttacagctgttgaaaaggacggcaaagtttacggacgcggttcaacggatatgaaaggcggcaatacagccctcttgtttgcgttagaagcgcttgaagcctgcgggattacgttaaaaggagatgttctgtttcaaagtgtcgtagatgaagagtgcggcggcgcgggaacactggcggctgttatgaagggctacaaggctgacggggcgcttattcccgaaccgactaatttaaagctgtttgttaagcagcaagggtccatgtggttccgcattacggtaagaggattgtccgcacacggcggcacccgctatgaaggggtgagcgccattgaaaaaagcctgcatgtcatcacagcccttaaagagcttgaacacgtccgtaacgcccgtatcaaagacccgctttatcgggacgttccgattccggttcccattaatatcggcaccgtccaagggggaacgtggccatcatcggtagctgaccgtgtggtgatagaaggcaggtgcggaatagcgccggatgaaacgcccgaagcagtaaaagaagagctggcaagctggctgaaagatttggagtaccgggatgaatggtttaaacaccaccccgcggaaatagaatggtttggggctcagtggcttccgaatgatctcccggatgagcatccgctgatttccgctctggaatcttcttttgagaaaatgaaaggggcaaaaccggttcgtgaagcgtccccgtggggaacggacggagggcttttgcagcacgcgggacagacgccggtcatcgtcttcggtccgggagaagtcaaggcggcgcatcaggcgaatgaatacattgaagtccgggcgttaatcgatgccgtcaaaatcatttctctttttatcatggaatggtgcggggtggcagatgggggtgacagcgctgataaaggaactgagggctgaaagcggagcggccgagattgatgcagaccgtttcaacgagcggatcagggtcattcgttatgacggacagcccgaggcgcttataccggccgttttggcagaagcaaaggaagagggagcccaaaaggtgattttctttgccaagcgcggcgatgagccggaatttgtcaagcatctttttattattgagggtgccatagacgggtattacaacgggcataaggctgttgtgatggtgcgctatttatcagaggaacggagacggtcagattcatatgtatcagaagattcggctgttgaccgtttatatgagacaccgcggcggggaatgactcagacagaaagcacgctgatgttcagaaaagcggacgaagatgatgcggaccgtttaacgcacttatataaacatgtttttcttacctatccgactcctgtttttaatcccctttatattaaaaaaacaatgaaagaaaacaccatctattatgccgcattcgatcaggatcgtctcattggggcggcaagcgcagatatcaatccggttttggggcacgcagaaatgaccgattgcgcggttctgtcagattacagggggaactccgtaacggcacacttgtttaaagcgttggagcaggaactcgctggccggggaatcattcatcttttttccttggcccgtgcagcgtcttacgggatgaacgccgttttgtatcatgcgggatacggctacagaggcaggcttgtgaacaactgccgcatttcagaagggctcgaaaatatgaatatatggtgcaaaactttacgtttggccattcataaggaggaattcgtttgacaaacaaatggtttcagccgaagcgtcactggaaggagattgaattgtggaaagatgtgccggaagaaaagtggaatgattggctgtggcagctcacccatactgtaagaaccgtcgatgacctgaaaaaagtcattcatttgaccgaagaggaagaagaaggcgtcaggatgtctgtaaaaaccattcccctgaacattacgccttattatgcttctttaatggatcccgataacccgagatgtccgatccgcatgcagtccgtgccgctgtcagaagaaatgcacaaaacgaaatatgaccttgaagatccgctgtttgaagatgaagattcaccggttcccggtcttacgcaccgctatcctgaccgcgttctttttctggtgacaaatcaatgctcgatgtattgccgatactgcaccagaaggcgtttttccggacagatcggaatgggggtgccgaaaaaacagctcgatgcggcaatcgcttacatccgggaaacgccggaaatccgtgactgcctgatttccggcggagacgggcttttaattaacgatcagattctggaatatattttgaaaaacctgcgtgacattccccaccttgaaattatcaggatcggaacgagagcgcccgtcgtatttccgcagcggataacggataacctttgtcagattttgaaaaaatatcatccggtctggctgaacactcattttaatacgagcatcgaactgacggaagaatcggttgcggcgtgtgaaaagctcgttaacgcaggtgttccggtcggtaaccaggctgttattttagcaggcattaacgattcggtgccgattatgaaaaaactcatgcatgatttagtgaaaatccgcgtgcgtccgtactatatttatcaatgtgatttgtcagagggaatcggccatttcagagcgcctgtgtcaaaaggattggaaatcattgaaggactgagaggccacacaacaggctttgccgtgccgacctttgtcgtcgacgccccgggcggaggcggtaaaatcgccctgcagccgaactacttgctctcccaaagtccggagaaagttgtgatcagaaacttcgaaggggtgattacatcttatcccgagccggaaaactatatcccgaatcaagctgacgactattttgaatctgtttttccgggaacaatggccaaacgcgagcctgtcggactgagcgccattttcgcggacaaagaggtttcgttcacaccggaaaatgtatcgaggatcgacaggaggaaaacgtttacatcaaaccctgatcatgaaacgctgaaagaccgcagggaaaagagagatgaattgaaagaaaagaaatttattgcacagcaaaagaaagagcaaaaagcaggatcggaagtcggaggtgagtcgccgtgaagccatgcgagtggtgcggcaatcagaaggcgtcagcttgtcaggcggctgtgtactgggagcttcctgacggtacgagagccatagaaattacagaaacacccgcattcgcctgctcctcctgcggcatgacgtatcaggaggaagcggtcatagcggaaatcgaaaatcagctttttttagtcgatgcaaaaaaattaccggaaacactcacatatcaagagctgatggggacagaacggatcttgaaacggaattattttgacttctcctagtcttcttttgttgtaatttcacacttgaattgtataatagtacaacaaaagacagtcatcaggaggggaaacccatgaaatccttttatcactatttgatgaaatacaggcatcccaaaccgcaggacgcaatcagccggtttgcgaatcaggcatacgaagatcacggctttccgaaaacgtcaagcgattatcacgagctcagttcttatttagaactgagcgccgactatttagaaacgatggcgacatttgatgaagcttgggaaaaatatgagaccgaggtgcatcacgcctgacgaaaaaccgcacattgtgcggtttttttctgttgaaatcaatcgcttatgaggtgccgtatgatcaaatcccgcaatgcctttcgttttgatcagcgcgtaaacaagtcttcctgatggcacggatcataaggcagcagaatgtatagctgcagagttcaccggatcagacctgctgccggcggggtcccgtgtaaggagcctcttttcacggagaaataatcaaacatttaaatgaagtgagaggaatcaaatgatctatggtgaggcactgacgtttggacggaaaagggaattttatgtgacaaggttgaagcggattgaagttgtggcttcattgaaagccgaaacgagtttggttcttcatgataaacaagccattgcagatatgcagccggaattggatctccatacatcttcgatgatgtgtttcacggcaaattttgaacatcacggcggtgatattgtcaacatgccttcgggccgggtatttatctttgtgtcatggagaaataaacaaaaactcattcaaaaacaggcgctttttgtctcgtcattgttactgctcattcgatcgagagcgcaatgccatcagacgcttctgttacggtaagtgaaaaaacgcacaagcatgttggggtttttgccattttgaacaggtgcagaaatagatatttcctgtggttttcatgcccatgcgaaattatggcggccggcatacgatagcgtatgacagtccgcggcaagggggagacagcatgaagccagataaaccgaaatttcaagtgggagacatcgtggtcgtcgtgatgtacggaaccgtcggcaccattacgaaggttcatcaaattgataaacattatctttatgaagtcaatcataatgaagtgctttattttgaatcgtccatccagctttataaagattatgagggcgtgatcgtcgatatggaaaaattagatattgaatatgaatttctgatcggcgacgtcgtatatgtaaaggactacggaaaggaattattccgagttatcggtcacagaactgaaatatggagatatttagaggatggctgggaggatattatttatgagctgactcggctgaaagacggagagtggcttgaaacggaggaagaggatctcacgctggttctgagaaaatatgaaatggatcagtttgtgcatcagctgctgtttgtccactatgttggggaagcatctcatgagatcggcgaggataccgtcgcgtctgctcttcttcagtttgaaggcgatgctgatgatcccgatgccctgcatgtgctggcggtatcgattgtagatgagctgcttgatatttataacgattataagattctttatcatttgttcggtgacgaagaatataaagatatgatgaattttgtgctggaaagcctgcgggagcatttcagctagccggcaaaaaaacggacggtgacatataaaaaccagggcagacagccggcaaagatgacaaacgacattcctttcagcactttttccaatacgatatcaaatccatctccgtccaataaagccatcattttcgtcattatcttttctccctccggggcttgtttttttaaaagtatatgagcggacaaaacgtttagaactttcgggtataatttgaacggttttttcataaaacataaaaaaggaggcggtgtttgcatgaaagaaatagatcttgtgattgacacagaagaaatagctgattatttttacagtcagcttgctatgcgcgggtacataccgagtgaagaggaaatcttcgaaatagccgacatcacctttgattatttattagaaaaatgtatgatagacgaagagcttgatgaagactgaaactgcggaaccgaagtgaaaaagcttcggttttttcaatcagctcgggagaatgaaacatggggggaaaacgttgtacaagccagcaagtcttttcgcattgtttattctgctcgcagcagcgatccggatagaagccgtccgggcttttgatgagcgtgtgatagaagcggctgtcaggatcaggtctgtctggctgaatgaattgatgttatggataacggagctcggcacgaccgcggtgcttttgccgcttcttcttttgacaggcgcagctctgtatatgtacaaaaaaacgccggatgttgtttttttgccgcttctctttctcattgaacggattgtaaacataaaaataaaagaattgattgaaagagccagacccgcttttgaaccgctcgtccatgaaacctcatacagttttccgagcggccactccatgaattcggcagtgatgtatcccgtcatcgcttactttttgatcaagcatgttccgtttttcacgaaaagaaagagggccctcaccgtctttaccggagttctcgtcattctgatcggattcagcagaatttatttgggcgcgcattttccgacggatgtccttgccggattcagtctcggactttgcctcgtttcgctttttgcgctctttgacgaaaagtatcatccgtttcgacaaaaatagagacaggaaaaatgagaaaaaacgctaatactattaagaaataagagggagggatcttgatgctgttatcgctgcccgtgtttaaaaaaaagacttgtgcctatgatgtgacgatttttcaaacaccccgctacggcgagaaaaagggatacagggtcgtctatcggacagagctggccgctgacaatcatcaagacgcactggaaagggcattttctgtttttaatgtgcctgatacggtcccaaacgactatcaagccagattcatagcgaccggagacgtcatactcatagacgaaggaagaaaaggaaagacctattacaggcttaaccctgcgggatggagtaaaattaaccggctgctcgtccagccgaggtaagacggagccggctgaagattcagccggcttccgtattgtctgggaaagacagtgttaaggcttccgtttagcggcggaatgctcttttccatgcgcttcatcagctgcaatgacgtctgaaacgggcacgtgattgttctttttctggccggtcacccggttgcgctgttttttgcccattatgttcactcctttttctttaggcttgtcatcccgcatattctgcccaagattgccctgatcaatgctgatgattgtctcttaccgttattcagtgtacaatgggtgggagtttgaataggcaggaggaaaaggaaatgagtgtacatataaacgcagaaaaaggccaaattgcggatacagtgcttttgccgggagatccgctccgagcgaaatttattgcggaaacgtatcttgaaaatgtggaatgctataatgaagtcagaggaatgtacggatttacgggtacatataacggcaaaaaagtatcagttcaaggcaccggcatgggtgttccgtctatctctatttatgtgaatgaactgattcaaagctatgatgttcaaaacttaatcagagtcggctcatgcggagccatccgtaatgacgtgaaagtgcgtgacgtgattttggctatgacgtcttcaacggattcacagatgaaccgtgtcgccttcggcagtgtagattatgctccttgcgcagacttcgaactgcttcataaagcgtaccaggaagcgcaaaaaaacaatcttcccgtagcggtcggaagcgtattcaccgccgatcagttttacaatgaagactcccaaatcgaaaagcttgccagatacggcgtcctcggcgtagagatggaaacgactgctttatatacgcttgccgctaaatacggcaaaaaagcgctgtctatcctgactgtaagcgatcacgtattaacgggagaagaaacaacggcagaagagcgtcaaacgacttttcatgatatgattaaactggcgctgcatactgtatcgtaaacttgagatgagggttatgctgattaaagcagccctcttctttatgcatcgccctgattcaaaaaaagaaaggtaagggtaaaatgaagaaatccactaaatggttctcgctcgctgccgctctcagcgtaaccgcaatcgtgggcaccggctgcagcatttcagacggcgacagccataaggacacaaaaacagcagctgaaacaaaacaatcagatgacacatcaagcaaaaaaacaacgaagacagaaaacagtgattttgtattagagagcaaatattttaatgatattaaagaagtgaacgggcttgagaccattcaaaacccgacaaatacacttgcgctcgtaaataagacatatacgctgccgggagattataaaccgaatgatctcgtaatcccgaaagtcgaattttcttttactgagaaaatcgagaaacgatatatccgcaaacctgccgccgatgctttggcggaactattcagcgccgggaaaaaagaaggttatgacctggttgccgtttcaggataccgttcttatgacagacagaaagttattttcgataatgaagtcagtctgaaaggtgaaaaaaaggcgaaagaagccgtcgcatatccggggcaaagcgaacaccagacggggcttgccatggacatttccagcaaaagcaacggatatgagctgaatgaggcgttcggaaacacggcggacggcaaatgggtgaaagaccatgcgtatgaatacggctttatcatccgctatcctaaaggcaaagaaaatgttacaaagtatgagtatgaaccatggcatttacgctatgtaggcaaaaaagcggcaaaagccatccatgaccatcaattaacgcttgaagaatattttaatgaagtaaagaaagtgtaatgagaagaagcccgcttgaaaaatagaaagcgggctttctttattaccagaagagcagacctccaagcgcaaatccggtaatgaaaccaaggccgataccgtaggctgctccccagcctccccagcctcctccccaataaccgaatccgtaccctctgtgacggccgccgacaggggtgatatacactttgctgttagtcacccgtacgattcttccgacgtggactctgccgtttcgttctgtaattcttgctacttttccttggtgctgccggcaaagatgataatagttttgcatcttttctcctcctatccaacctatctttctatgtcagcttatgatagagtgcggtaaaaaggttggacgaaaacaggaggacaattgccgttttacttgtaagcgacaaaagcgcagtgtcccatatattcacggtacgtctgcataagctcgtaatgagccgtcagcgtatcgtagtgaaccggctgaataacgggcgataaatccatttctgtagtcggctcctgcgcattgttttcatagacagcgggaatgaaatccgctttctgaaagccttgctgaagcaatctctgtttccatgcggtttcatcctgcaatacggtaaaaccgtagaagtcttttatctgcgtgatggcgttttccggcatgggcttttgtaaagcagcttcaatgccgatcagcatgcccccgggtttaaggacccgcaggatttcagacagcgatgaatcaagatttgaaaaggtgagaactgattcggaaagaacggcggaaaattgattttcagcaaacggcagccgctcaagctccgctaaatagcccggaatggttaagccttcagcggcaaatcgttttgctgctttttcaagcataaggggatccttatccacacaggtgacgggatacagcaggtggccgagataagcggccgtctgtcccgttccgcagccggcgtcaagaatcggttcgccaggaggaggagccgcttttgtgagaacggctttggaaaaagcgagcccgccggggtgagcccctccgactccgaataaggacagcatttctaaatatttgctcaaaggccgaatcctccttttttcctcagcatatgttgagagaaaagcataggtttgggtaaacgggaaagaagggcgcctcacgtttgaagttgacgaatgagcgttcgtctatgataataatgtaagaataaaaaggtggtgttttcttgaagcggcaatttaaactgttttttattatattgatcactgcggtcgcagcctcagcgcttacgctgtttatcacgggcaatacgaccattttcggacaaggctcggctgctttgacgaacagcaaatttgagaaattcaataaagcctatgagcagattaaaagtgattactatcaaaaaacagatgacagcaaattagtagacggagcgataaaaggcatgatcagttccctggatgatccgtattcttcttatatggatcctcaggaaggaaagtcgtttgaagaaacaatttccgcttcgtttgaaggcatcggcgcacaagtggaagaaaaggacggcagcatcctgatcgtatcgccgattaaagggtcacccgcggaaaaagcgggggttaaaccgaatgaccagatcttgaaggtcaacggcaaaagcgttaaaggccttaatgtaaacgaagccgtcgcattaatccgcggcaaaaagggaacaaacgtcaagcttgtgctgcacagagcgggtgtcggcgatctgaacctgtcgatcaaacgtgacaccatcccggttgaaacggtgtactctgaaatgaaaaaaggagacatcggcgaaatccaaatcacatccttctccgaatcgacggcaaaagagctgaattcagccattgacagcctcgaaaaacaaggagcgaaaggatacattctcgatttaaggggcaacccgggcggcctgatggatgaagccatcaaaatgagcaacatgtttatcgataaagggaaaaatatcatgcaggtcgaatacaaagacggcacgaaagaagtcatgaaagcgacgaaagagcgcaaagtgacaaaaccgacagtcgtcctcgtcaatgacggcaccgcgagcgccgcggaaatcatgtcggctgcgctgcatgaatcatccggaattccgctgatcggcgagaaaacgttcggaaaaggaaccgtgcagacggcaaaagattacagcgacggttctaccgttaaactgacaatcgcaaaatggctgacagcggacggagagtggattcataaaaaaggcatcaaaccgcaatatcaggttaagcttcctgaatatgcgaacctgccgtatttagatgcgaaaaaaacatacaaatacggggattccggaacgaccgtcaccaatgcgcaaaaaatgctgaaagcgctggggtacagcgtgaatgtaaacggcacgtatgataaagcatttgaacaagcagtcaaacaattccaagcaaaagagaagctgaaacaaacaggtattttaacgggagacacaacggcaaaactgatgacggatctgcaaaaacagcttgcggacaacgatacacaaatgaaaaaagccgttgaaacattaaataagaatatgaaatagtaaaaaacacccgatgcgtcgctcgcgcatggggtgttttttgtttgcgaaaagcccgtcttatgtcgtttcctgttcaaaaaggtggctgttcgcctgaatgaaaaactgtgattgctcatagtgataggtgacttttgagaaatcaaacggctggccgttggttaaatgaaaaatcgtttcaacgcaaagcttaggcgctcctgtaaacagacctaagtactccgcttcttcctcatttaacatccccgcgtacagatataaatctgaaaaaccgcgctttaacccgagaccgtctctaatataatcaaatatggattctgccacgatctctttattcaaatacgtaataatggatttgttgtaaaatgactcttcgatacacaatgtcagcccgtcaatatatcggattcgcttgacataatacacgtcgccgtcaggcggcatattcagattttgagcagcctcaggcgtgggttttctcacttccagcgctaataatttggaagtgacattaaaatcttcaagtgattctttaaatccctgattagaaagcagactgatatacccttttcttttattccgtctgacaaaaatgccgcttcccctcacttgaaacacaatcccctttttttctaataaatctaaggacttggttatcgtgcttttgctcacgttaaaccgggtcattaaggtttgcagcacaggcagtttatccccttgctgcagctgatgttcttctatgtatttttcaatatctatcgcgatttgctggtattttaacatatccattcctcattcatttattgtcccgcttctttcagaattatagcataatcgtttttaaaagccatttcgtaaattaactataattgtttatgtattgataaattataccggtacaattataatgtaaacgtataatatgaaaatgaaggcaggaattcttctacacctgcgaagcggtgcttgaagctgctgcagtgcatttattcggtatgcaagcggcagtcaaataaaggaggatataaacgatggggacattgccaaaagattttttatggggaggcgctctggccgcccaccaatttgaagggggatggaataaaggcggcaaggggccgagtgtagtggacgtcatgacggcaggcgcgcatggtgtgccccggaaaataacagatacaattgaagagcgggaattttatccgaatcatgaagcgatcgatttttatcatcgttataaagaggacatcgcattattcagcgagctgggcctgaaatgtttaagaacgtccatcggctggagcagaatttttcctaaaggtgatgaagcggagcccaatgaggaagggttggctttttacgaccgggtgtttgatgaattgctgaaacatgggattgaaccggtaattaccttgtcacattttgagatgccgctgcatttggcgagggaatacggcggtttcagaaacagaaaaacagtcggattttttgtgaaattcgctgaagtgtgttttgaacgctataaacataaggtgaaatattggatgacgtttaatgaaatcaataataagatggatgtgaataatccgatctttttatggacgaactcgggcgtcgccgttaaagaaaacgaaaacgcaaaagaagtcatgtatcaggccggccatcacgaactgctggcaagcgcattggctgtttcgaagggaagagaaatcaatcctgagttcaggatcggcgcgatggtatcacatgtcccgatttacccgtactcatctcaccccgatgatgtgatgctggctgaagaaacgatgagacagcgctttttcttcccggacgtccaggttcgcggatattatccaagctatgcgttaaaagaatttgaaagagaaggctatcagatacactttgaagacggtgatgaagagattttgaaaaatggccgagtggactacctcggattcagctattacatgtccactaccgtaaaaagtgacgtgataaacgataataccggggatgtggtaaacggaggattgccaaacggcgtggaaaatccttatattacagcgagtgattggggctgggcgattgacccgaccggtttacggtacacattaaaccgcttatacgaccgctaccagattccattatttatcgtggaaaacggattcggcgccattgacacattagaagaggacggttcaattcatgacgcttcaagaattgaatatttatcgtcacatataaaagctttggaaaaagcagtcacatatgatggcgtggatgtaatgggctatacaccatggggaattattgatattgtgtcatttacaaccggagaaatgaaaaaacgctacggcatgatttatgttgatcgggataatgaaggcaacggttcaatgaagcggcttaagaaagactcatttgaatggtataaaaaagtgattgaaacaaacggcgcatatgtatcctaaaggtgtaaaaagggaaggcttcaccgttgtgtgaagccggctttttatcagtaattatgaaagcgcattcattaaaacgggaaggaggtgactgtccggcttttcatttagaatcgcttataaaaataaggaaagggatggtggttcatgttttttaaaaaaagtctgcacatgaccctggtttttcttatgtttttctttttcatatcaagcagcacggaagccgaagtgtatgcggctgatcggaaggcttcagacaaaaacaaagtaagggtgtggttcagttctgaaaaagatccggcttcccgtacgtggtatgacgggccgctggaagtgaaatacgccttagacgaacaaacaccgcttacatggacaaaaaagaaggcttctgactccgccgccgtgtatattgatccgtcgcgccgctatcaaagtgtgttgggcgtaggatcgtccctggaagaatccacaatccataatttatcaaaaatgacacccgcaaaaagaaaagaagtgctgaaaaaactggttgatcccaaagatggtatcggcatggacgttatgcgcataacgatcgggacatctgattttacggcacaggaattttatacgtatgacgatatgcctgaaggccaaacagatcctaagctccgtcatttctcgatccaaaaggatattgatttacacattacagcaaccatcaaggaagcgctggcgataaatccggaactgaaaatcattgcctcaccgtggagcccgccggcttggatgaaaacgaatgaaaacctcaagcggggaaagctgaaagataaatatatcggcgcactggccgtttacttccgcaaatttattgaggcgtacgaaaagcagggaattccgatttatgcgatgacccttcaaaatgaacctttgctggaaatcgactatccgagcatgtacatgccgccgtctcaggagcgcaaactggcgatagccgtgaaaaaagaattgaaaaaacacataattgacacgaaaatttggatttatgatcacaatgcgagcggggcgtggaactatattccgccgattttagatgataaaaaaggaaaccgggcggcagacggcatcgcttttcacgattatgacggtgacctttccgtcatgtcggaaatcggaaagagatatcctgatcaatctattcacttaacggagcggtctgtctgggggacggcaggggcggatcggatcgcacagtatttccgcaacggcgcgtcgagctacaatgcgtgggtgacgatgctcgacagtcaaattaagacgcatcattggataggcaccccggacccgacgctgtttattcaggatgctaaaaaccctgaccgctattggaatatcccgatctttcatatgacaggcaacttttcaaaatttatcgagcgcggagccaaacggatagaaagtaattacggctccaaaaacacagtctcgaatgtatcgttccttaatcctgatcaatccattgtgacagtcgtaatcaaccagacatcttcagaacaaaaattccatgtcgtttcagaaaatcggcagtttgaagccgtcatcccggctaaaaccgtcgccacctacaaatggcagcacaaaaagtaaaaaagccggcacatcgatgtgccggcttttttctgttaagcgcctttttggttcagtttatcagagggcgctttattgaataaaccgtctttgacggcgtttgaagacgctttttttacaaaaaacgggttaaggataataacggcagccatgttagcggtcaacccccaaaacccttcatatataccgtgggcggattgggtgatatttaccgtgaatgtcacgataagaccgacgagaagaccgataattgtcgcttctttcgtttgattcttccaaaacagactgacggcgatagccggaaagatctgaaccatgccggaaacaccgagaagctgaagggtaacgagcgcagtcgggaacagcataccgaataaaagcgcgagcccgatgacgacaaataccattgaacgggtgatcatcgtcagcttgcttggtgacacattcgggtgaatcaaatcccgatataagttattcgcaaataagtttgatgctccgatggccatgatagagcagggaatcaatgacgcaagggcgatcgtggagtaagcaaatccctgtgcgactccgccgtaagacgtttgaatcagcttcaataaagcgagccgcggattggtatcttccggaaggacaagaaacgcgataaagccgagaaaaataacaagaatcaaaacaatattataaagcggcagaaacatgctgtttttgcggacggcatctgcgctttttgccgtaaatacaccggttgccgcatgcgcccacataaagagcgccagcgcagatacgatggaagctgtgataaaccaaggaattcctttcggccccgagtccggtatcgtcagcatttgcggcgctttttcagccaaagtgtgaatcatcggcgtccagccgtgaaaatggatcagcgggagtgagacgaccataaacagcataatcacccacaccagaatgtctttaataatcgccgtaaacgtcggccctttaattccgctgaaaaaagtatacagcgctacaagaataaaagagatgatgacgaccatattgacattaatgacacccgttccggccacctgaagcgtatcttgaatcccgctcagctggagacaaatataaggaatgagcataagaacgccgacaatggcgacaagactggccaaaagtttactgtcaaaacgctcacgggcataatcggcaagcgtcgttaatttgtgaatttttgccactttccacaatttcggcagaaagaaataagcgataaaatacgccaaaacagaatacgggattgcaaaaaaagcaacgcttccccctgtgtaggctgtgcttgttaagcctaaaaacgtataagccgtatagagatccgcgccgactaaaaaccagacgaggagccccccgaaccgtctgccgccgacagaccattcctcaacagaagtacgtgatgatttgtctcttccggctataaagccgatacagacaacggttaaaacgatgacggctgtaatgatcaatgctgttatatttgcgggcatcagtccagtcctccttgtttcttctgcagcctataaataagaaacgaacataatggagtgactgcgatccataaaagcagccagaaatgaaaaaagggcagcccgataatgatcggatgaacccgattagcgactgacagcagggccagctggctgaaagggattaagatgagaacgaaaattagtgcttttctgaccatttactttcctcctgaaacttgataatgctccttatcatagcaggtgtcagataagatcacaagatatttttcagaaaaaaaagaattctattacttttttaactgaaacactttagttgcatcttcattcatattaaattagaatagttaatatctcgaaatcaagatatttaggagtgaatacattgaatacacaaggattgcaccatgttaccgcatttgcaaaagatcctgctgaaaatcttcggttttatactgaagtgctgggtttgcggctcgttaaaaaaaccgttaattttgacgacccggccacttatcacttttatttcggcaaccaaaacggagagccgggcacgatcattacattttttccttttcagggaagccgcccgggaaccgtgggaaaagggcaggccggaagaatttatttctccgtgccgaaaggagcactcgcgttttggaagcgccggcttgaagaaaacggcttgtctgtaaaagaacagatcatgctgtctgaacaagtccttctctttaatgatacagaagacctgccgcttgccataatggaagatgaaagaagcggacagagtgaatggactccttcgggcattactgaaaaagaagcgatcacaggcatgagaggtgttcttctgtactcgtaccgtcctgaagcaaccattcaatttctcatagaacgcttcggttattcaaagacaggagaagaaaatcaaattgtcaggctgcaatcggaggcaaggatcggacatattatagatgttgaccttgcgccgaaagaagcaggtgccggcggttacgggacagttcatcatgtcgctttccgcacgagcgaaaaagagcaggcggagtggaaggatattcttgctgattctcatcttgcttcatctgacattcttgacaggtcatactttacttcaatctatttcagagaaagcggcggcattttatttgaaatggcaactgacgaaccgggctttatgacggatgaatcctttgaaaatctcggaacagagctgaagcttccggaatggctggaagagcatcgcagtcagattacagctgttctgcccataatggagaaaggagaatgatgatgaaacatgtgtttgaacagggaacgtcagaaaatgttctgctgcttttgcacggaacgggaggaaatgaacatgatcttctgtcgctcggacgttttatcgatccgaacgcaagtctgctgggggtcagaggatcagtgtcggaaaacggcatgccccgtttttttaagcggctgaaagaaggggtatttgacgagaaagatttaattgaacggacggaagaattaaagaattttattgatgaagcggcgcaaatgtacgggttcagcagagaaaacgtgattgctgccggctattcaaacggcgccaatattgcagcaagtcttttgtttcattataaagatgtactgaaaggagcggttctgcatcatccgatggtgccgatacgcggagtgaagctgcctgatatggaagggctgcctgtgtttatcggtgcgggaaaacgcgatcccctatgtacaaaagaagaatcggaggagctttatcagtatctgacagatgctcatgcatccgttgctcttgaatggcaggagggcggtcatcagctcacacagcaggaagccgagcaggcacgagcctggtacagtgagcgattcctataaaaaacccttagtctgcttaagcggactaagggtttctttcatcttacagccaagttgacactttagatacaggcagccggttgcttttatgcgccggcttaacggctttaccgattgaaatcagcatgacgggcacgaaacgctcgctcacgtcgaattctttaacgaattgctctttattgaatccgccgatcgcgcaagtgtcgtagccttttgctttagcggcaagcatcagctgcatcgctgctaaagaagcgtttaaaaatgctgaatcgcgggcaaactgatcattttggtatgcaccgttaatctggcctaaaagcgtttgtttaatctcttctgtgatattgccttgctcagccagttcagcataaacgtcttcaccattttcatttgcttttaagtcgcctaatacggcaataactgctgatgaatcaataatctgtttttgattaaaagcaaccggaagcagggcagcttttgcttcatcactgtgaaaaacttgaaaatgccaatgctgaaggttccaggcggaaggcgcttgcgttgtgatttcaaggagttctgtcaattcctcttttgtaatgaccgcgtctttatcgtattctttaacagatgcgcgttcctttaaaacgtctaatacggatgtcatcatgtttcctccttcggataaacgtgttatcataatagaaaagttagaagcttactaaatgtaacttgaaaactaattttaatggatcacaaaaaacttgtcaattcatagatgaagggatgaattcacgtgggatatacaatgtgtcctaaaatggaatccgctttttctcttttgggaaaacgctggaacggcctcattatccatgtactgatggacgggccgaaacgatttaaagatatgaccgaaacgataccgacaatcagtcaaaaaatgctcgcggagcggctcaaagagctggaacaaaatgaaatcgtcgagcgtcaggtgctgccagaaacacctgtcaaagtcatttataaactgactgataaaggcatggcactgcaagccgtttttcaggaaatgcaaaaatgggcagacagtttttgcgagcccgggggatctgccaacgacacatgtgatgaataataaaggctgcccaaggcagccttttcttaatgataatgtttaatcgtcataaaaaccattaatatcaaaattgttcagattgaggttcaagccttttaattgatttaataaagcatcgaatgtaaggaaatgatcatttttacattccgccggaacatcatctggagaaaatagttccattcctccctcaatccactgtttccggtataactgaaatgccgcttcaattaaatgatcaggcgttacaataaaccctaagcttacgtcatggtcctcactgtagccgaattcaaacccgcagcaagggcagatatcaaatgttttttgatattcgccgttataaacgggacttgtctctaatcctttaaatccgcatatcaaacaaggatacaactcactaaccaacatccatccctcttttattcagtttgaaaacatccaaaacaagcagggaggccttttacagtttcccggttaaaaactgagcctcaccgagcccgaagctccaatcggcgttcccgttttctgtaacggaaatcatgacgtcctcgggtgatatgccgcattctgttttaagctgatcagccatcagttgatataacgtttctttctgatgttcggtgcgcgctttgctgacaatgctgatgatgacaagagctttgcttcttttgaaaccgagcccggtatcttcaatgataagctcatgaggccgatgctggtgaacgatctgataacggtccgttactgggacgtcaaaagctttaaccatggcgtaatgggcggtatccagtaacttttttaatgctgcgtcatcccggccttcaataacgtcaaaacgaagtaatggcatattttattccccctgatggttttataatatcgtaacttgtaaaaaaagtataacagttaatcaaaatataatcaaattataaccaaaatgtttacatattaatgcaatattaaagagaggcacatgttgttacaatcgcccaatcaatttcctcattttatgaatacgcttaagaataggcagacataaaggaggaaaaacatgtaccctcgtcatgcattgtatcgcgggaatttcggtcctgccggatttccggcgagaagtccttttttgttcggcgctcctttattcggcggatttttaggcggtcttctcggaggcgtgattgccacaggttttacaagaccccgctatccgtacgggtttgccggttacggatacggaggcgtcccatacggcggtttcgggccgggagccggcggttatccgccattttattaagaaaaaacggcctgcatcgcgcgggccgtttttttatcttaaaatctccacttccgatagattgtagtcttcctgttttgaaaacataacttcaatcatcccgtctttatagactgcttttgttcctttccgtttgacgaggctcggaagtacgatttctttttttccttctcccaggctgctgttctctacaacgaggctgtgtgacgtatgcttaatcctgatacggtcgagttcctcttgttcggcgggaattttcgcaaaaacatgatcggatgtttcaaacaggtcaatttccggcttgggcggttccgcttcgaccggatcggcctttttggacatcgggtcgcgaaaagggaactgtccggcataaccggcgccgaatacgctttccatcactcggttgacatatgtctcgacatctttcggatcagcatttttaaacgtttctttagagaactgattttggaagggaaaatatctgttccaatcaaacacggcatctcaccctttcttaacggacaacatagtatatgcccgccggaagcttcccgtgatataatataatctgtttacagaaaggaaggggaaggccgtgcaagggaataacgtaagaaaaggaatcatttataccgcttgttctttcgtcatgtgggggctgtttccggtctattggaaacttcttgaacaaatacccgcattggacattttagctcaccggattttatggtcatttgttttcatgtgtgtgcttttaactgtgcttaagaagtggaaaaccggatggcgtgaactgcgtcttttgaaatcggaagggggcctgctggcgctttttttcgcttccgttttaatttccgttaattggtttgtgtacatatgggccgtcaatcacggctttttgcttgaagcaagtctcgggtactacattaatccgctcgtttccgttcttttgggcatcctattcttaaaagaaaagcttaacaagatgcaaacagcagccgtttctattgccggggcggccgtgctcatatctgcgtttcaatatggcgcggttccttatatcgcattgctgcttgcattcagcttcggtctgtacggcttatgtaaaaaaagaacccgcatgtccagcacgatcggactgacgctggagacgcttttgattaccccggctgcacttatttatttaggatatacagctgacgggagcacttttgggtccttgggggcaggaacatgggcgctcctatttttcgcaggcgtatttacggccctgccgctgttattgtttgcagagggggcaaagcgtctgccgctgtatcaagtcggcattttgcaatatatagcgccgaccatcacccttatgcttggcgtatttgtgtatcatgaaccgttttccgggcaaaaagcgtttaccttcatttgtatatgggcagcattgcttttgtttaccttttcacagataaaatggaagcggccgataaaaagccgctaagcctttcgctttccagcgatagcttaaattatgtataatcattacgagtatgtaaaggagctgtacaatgggcactgataaagacatagcaaaagcctatcaggcactgtggaataaccgcactctcccggcttcaacccttgaagaagcggaaaaggcgattgatcttgaactgcttgatcaaagaacacatccgaggctccggaagtcacccgaggaaaagtttgctctggcggtgcagcgaattgtagattcccggctgcggccgattgagaaatatgaattggttgaactacatacgaagcgtttgcaatttttaaaagaagaaagaggggagcagctatgaaagcgatcataaaagaagatgtgcaaacttctttagagcgatatgccgatcgtcctgtatatatccatttggaaacaacgaccggttcttattcagcgcatctgaatgagaaaaatatgacggttgtagcctatatacgcaatgcaaaagtgacgtaccatcaggcgaaaatcaaaggaaacggcccgtaccgcgtcggtttgaaaacagaagagggctggatttacgcagaaggtttgactgagtatacagtagatgaagaagaccgtttgttaatggcggggcatctgccgggcggaaaattggcgatttcgcttcaaatcagcgaaaagccgtttacagtttaaagaaaagggtgaaaatcatgaaagaacatgtactcgtcatcctgcctcaccctgatgatgaatcatacggagtggcaggactgattgctttacacagacaaaaagatattcccgttacgtatgcatgcgcaacgcttggcgaaatgggccggaacatgggagatccctttttcgcgaaccgtgaaacactgccgctgttaagaaagcaagagctgattgacgcatgcaaagcaatggacattactgacctgagaatgctcgggcttcgtgataaaacacttgaatttgaagatgacgagtggctcgcggatatgatggaagagattatcgacgatgtaaaaccgagtctgattgtcacattctatccggagcacggcgtccatccggatcatgatgcatgcggcgaagcggtcatcagagcgctttacagaaagaaaaaagaggaccgcccgcgcacgctttgcatggcaatcacccgcaacagggaggaagccgtcggcaagcctgatgtcattcttgatattaaagaggttgccgatattaaaatgaatgccttaaaagcgcaccgcacccaaacggaaggcatgctgagagagctggaagaaaaattaaaaaataacgagccggttcttcagacatggtttgaagaagaagtgtattggacatatccgtggaaagactgataaaaaaagggataaggctgaaatgccttatccctttttttgtgtcagatcggaagcgatcgcttccgcaagcgaagaccgtattgataaatttgaaaaactcagtccgagctgcaccgcggtttgggcgatttcaggacggattccggataacgtcgctttcacgccgagcattccgagtgattcaattaaggtgaaaagctgttgggcaaccatcgtatcaatcatggctacgcctgataaatcaatgtacagctgcgtgatgcgcttctctgaacactggtgcagcgtattctccaaaatcattttggctcttgccgtgtcaatatccccgatcagcggcagcagtccgacattgtcaaaaagcacaattaccggcgagctcagctctgtaatcaattctttttgcgcttcaagctgaatgtttgtgtttttatacatttcctctatgaaaatatgaatgaccacatcaaacgatttaatcagcgtatggaatatatcttcggcatcttcttctgtcacggtgtctgaatgaagtctggtaaactgctttacatggccgacatacaaatcacgaactctgataaactcgcgaatgatgtaatggatgggagtttttaaatgttctttatcccgtgcggcttcaaacgcccacttttccaatgccgctgtatatacttccttctcttcagaaaaaatccgattgagttgataattaaacgccagattttgttttttcagatttgtgagaacagccgggtcagtagaagcataaacagaatcaggatccgtatcatgaagggtatcaaaccatgtctgactgatatcctccgcccgttcggttaaataatcgtacagcagtttatgtttcggcattgctgctcctcctttataaaatcatcatttttttcacataacgcttttgcagcttcatcagtctgaagaataaaccgacagctcctgcggcaagtcctgcaattaacccgatccagtagccgtatgccccgaggctcgtgtaagtgccgactgcgtaaccgagcggaagcccgataatccaatacgaaacaaaagccgcaccgagtgtatagttgacatccttatatcctctcagggcgccttgtatcggagctgctacggcatcagaaagctggaaaaacagcgcatagattaaaaagtgctgcgtcaacatgagcacctccggatctgatgtatacattccggcgatttgcggcctgaacagtaaaatgaaagccgccgtgcataaagaaaaacaaagggccatcacaatgccgatatagctgtatgaccgggcatccctgtaacgctttgcgcctgcttcaaagccgactaaaatcgtcatggccatggatacgctgagcggcagcatatacaagagggaagcaaaattcattgccgcctggtgggatgcaatcgtcaccgtccggaaatggctcattagaagtgtgacagccgcaaaaatgctcgtttcaaaaaataccgcaaaaccgataggcaaaccgattttcaaaagttttctgcattcagacggagaaaaacggtacagtttccgaaatacagagtacccggcaaacggctcaaatctgaagacgataaaaaagctgacggcgcaaatacaccagtaagtcagggcggaagcgagccccgcaccgactccgcccaatgccggcatgttgaatttcccgaaaataaatacataatttaaaacaaaattaataggcaatgagcaaagcgtaataagcatcgtgactcgcgttttgccgagtgcgtcaatgaacgagcgcaaaacggcgtacacaaacaaaggaaaaataccgagggataaaaagcctaaaaagtgtttggcgatcgtccggacacgaggttccaggcccaaatgtcccaagatcatatcaacggtgaaaaagccgaccaggataaccgccgcactgagaatggccgctacataaacggcctggatgacggaaaacggcacttccttttgtctgccggctccaaacagctgcgaaacaacgggcgtaacggccattaatattcctgcaaggcccgtatacaccggcgtccacaggcttgaaccgattgcaacaccggctaaatcggcggcgctcactttccctgacatcaccgtgtccaaaaaggtgatcagggcaaggcccgcctgtgtgattaaaatcggaatgaagatatgtaacagctgtctgaccttttggccgatcgtgttcgtttctctcaatttaggttccccgtttctttattttaacgagagaaattataacattttatgtataaaaagcaatgaaagccggcctactcttttttatccggtttcggctttttaaacatcttggcataaatgaatgaaagtgaaatgacccctaaaaaggtgcagatatattgcatcagccgtgcaaattccatatgatttcgcctcctttcatgattatggtgtacacagcggcgcatatccatgcgcgcgatgcagaaaataagggaaaggagatgatgtgacatgcgccacactcaaatgacggaaagcgcgtttaccgctgccgttcaaacgtacttgaaacaaattaccgaggatgccggaatgatactgcggacattggatgaaaaagaccaatgccttctttgcgaattagatgaactgggacatacgtttcaggaaatgcaggctgtcgcttcgtcgttttacctgcagtcatatatcgaacattttacgccttcctatacagagctggcgagggccgtgcagcatctggcggaagaaaagcacggagcgctgattgtgattgaacgtgcagatccgctggacggaatgatacaaaaagggaccagcctgcatgccgagatcagttcagctttaattgagagtattttttatcccggcaatccgcttcatgacggagccgtattggtcagagaaaaccgggttgtatcagcagccaatgtgcttccgctcacaacaaaacatgtcgatctcaaatacgggacgcgccacagggccgcgatgggactttcggccgtgactgatgcactcgtgctcgttgtttcagaagaaacgggaaaaatgtcttttgctaaagacggcggactgtatccgcttgtttcgccgcgggcgcttcatacgaaataataagaaaatgggaatattgtacccatttaatattaataaggtgaacatctttacctttttctgtattggtgttatcgtttaaatatacataaaatttaaaagaatagggagtggaaagatggcaaatgtattgatgatcggctttccgggagaaggccatatcaatccgtctttaggcgtcgtaaaagaactgaaggcaaaaggggaacatgtcgtatattacggcgtgaaggaatatgagcacaaaatcgcgtcaagcggagcggaattccgtgaatgtgaagatttccgaaaagatgaattcggaaaaaacgcaacgggtgatgaacagcgggatgctaccgagtttttactgttaatgattgagacttccgaaaaagccgcactccgtattcttgaggaagtaaaagatgaatcatacgactacatcctttatgatcatcattttctggcaggaaggcttgtgagaaataagctgaaactgccggcatattcactttgcacaacatttgcaatgaatgaagcatttattaaagaagtgttttcaaatacaaaccttatatcagaggaatcatctcattatccggcttataccgaagcggtcagccggcttaatgaagaattcagcgcagacattaaaacgccgtatgatattttctcaaatgacggcagaaaaaccatcgtatttacttcaagagcgtttcagccgaaagaagaagagtttggcgattcttatctctttgtcggtccgtccataactgaaaggccggcggctcaggatttcccgtttgaccagcttgaaggagaaaaagtcctgtttatttcaatgggcacgatttttaacaatcagaaggaattgtttaataaatgcttaaaagcggtcaggaactttaacggaaaagccgtcatgtcaatcggcaaacatcttgatccggcggagcttgatgaaattcctgagaatgttattgtaaagccttatgttccgcagcttgagatcctgaagagagcggacttatttatcactcacggcggaatgaacagtacgagcgaagggctttactacaaaaccccgatgatcgtcattccgatgggagcagatcagttcgccgtcggaagccaagtggaaaacacgggcgcgggcaagatgtttaaaaaagaagatgtaacagcggaactgctcactgaagcaataaaagaattgagcgaaaatcctgaatatcagacaaaagcttctgaaatcggagaatccctgaaagcggccggcggagcacagcgtgcagcggaattgatagcagaagacgtgaaaactgccgagacccgggttctgtaatcagccgtcacccgcttcctttataggaagcgggcttttttttgtttgtttttcgggaggattttcacgccgtgaagagaattgtatgaaaaacagacaagaaaggtggaatgtcgcggaaaaaagccatgttatgaaaatgattccaaagtcttttgtgaaatgttctcaatttatgtaaaatgtgtggcattggtgatgatctaagaccaaatgaatcggaattaatgtcgacttctgaatgaatcctgcataacaggcggcgtccaaagaaaaggaacgtccctttcagcaatgataaataggaggtttttcgttatatgaagaaaaaaatcgcagccggactggctgtatctgcagtaatgacttcaaccttcgccgtgcatcccgctgaagcaaaaaccattcaagtaaaaagcggcgactctctttggaagctttcccggcaatatcatacaagtatttcagccctgcaggcggaaaataaactgaaatcaacgatactccacccaggacagcggctgcacattcccgacgggagcggcacacataaaacggggcaaaaaggaaaacgaaacactggtgcttacacagttacatacggagactcattatgggtgatcgctaaaaaataccgaatgagcgtttctgaactgagaagcctgaaccgtttgagttcagatatcatctatccgggccaaaaactgaaaattaaagggtctgccggcggcacggacggaggcggcagacagacaaagcctgataaaggcgcatcagggacttacactgtgaagccgggtgactcgctgtggaaaatcgccaatcaaaccggcatcaccatcgccgaactgaaaaagctgaatcaattaacatcagacatgctgtatccgaatcaagtattaaagatcaaaggttcttcacataacggaaacagcggcacaacaccgccatctcattcaaacccttctgagaagccatccacttacaaagtaaaagcaggcgattccctctggaaaattgctaatcggttcggcatcaccgctcagctcatcagagaaaaaaataaactgacaactgatgtgcttcaaatcggacaggttctgttgattaacggaacgggaaaaacagaagatcctgtgcggcagccgggtaacaaaccggcaaagccaaacaagccaaatactcccgaacctccggtgacagggtcaaagattgacagaatgataggcgaggcgaaaaaacatgtcggcgtgccttaccgctggggaggcaatacgcctgcgggcttcgattgcagcggttacatctattaccttttaaataaggtaagctctgtttcccgtctgagcacggccggatattggaatacgatgaaacatatcagccagccgtcagcaggcgactttgtcttctttacgacatataaagcgggcccttctcatatgggaatgtatttaggcggaggagattttattcacgcaagctcctccggggttgaaatttcaaacttaagcaatccatattggaaaaaagcttatttaggagcgcgcagttatttttaaaaaaaagcctttcggggctttttttgtttaccattttcacgttttgacaagactgatgggtaaaaaaataagggggaggaagcatgaatcgtctcttgctttttctcatgctcgcatcaattacgctttgcggctgcggggcgagacccgctcctgctccgcccaaaaaacatggggaaagccgcgcattggaagcatctgcataccgtgagcatgccggactcatcaatcaaaacggaaaaacgatcggatatatcgaagtgagggaatctgatgatgaaggatcagacattcatatatcagcgggacatctgccgcccggcgcttctctcggatttcatatttatgaaaaagggacatgtcaggcacctgatttcgaatcagccggcggtccgttcaaccctttgaacaaagaacacggcttcaacaatccgatgggtcatcacgccggagatctccccaatcttgaagtgggggctgacggtaaagtggatgtcattatgaacgcgccgcaaacttcattaaaagaagggagcagactcagcctgctcgaccgggacggaagcgcgttcgtcattcatgaacatacggacgattatttaacaaacccgagcggaaattccggagccagaatcgcctgcgctcccctgacaaaaagcgcccgcagggaatgagcccttttgtattgagtatacaagggcttttttagtatactcggttatggaatacaaatggaaaggaaacatcacctatgacttcagaattacagcacctatcacttccggaagatatacaaaacaaactgcaggcttatcaaaatcatcccgtttcccaagaattccgggatttaatcggatcatcaggctatgaggccgaagataaagcgattgtattcgatgccgtcatcgctttgacaatgggaaaaaatatcttattaaaaggaccgacgggttcgggaaaaacaaaattggcggaaacgctttcgaactattttcataaaccgatgcacagcgtcaactgctccgtagacctcgatgcagaagcgcttgtcggctataaaacgattgaaaatgaacaggggcaggcgacaattgaattcgttcccggacctgtaacaaccgcaatgaacgagggacattttttatacattgatgaaatcaatatggcaaagcctgaaacccttccgattctaaacggcgtgcttgattacagaaaaatgatgacaaatccctttacaggagaagtgattaaggcaagcgaaggattcggtgttatcgccgcgattaatgaaggctacgtcggcaccgttccgctgaacgaagcccttaaaaaccgttttgtcatcattgatgttccgtatattaaaggaagcctcctgaaacaggtgctgacctctcagtctgtcttaaaagatgagaaattaattgagcgctttatgacgctgtcttctgatttaatcgcacaagcgcataacggacaagtgtcagaagaagcggcgtccatcagggctctcatagatacgtgcgacttggctgcgtacatcccgccgaaacgggcgattgaaagaggcatcgtggaaaaacttgacgacgacagggaaaaagccgctgtcagaaatattgcagaaacgctgttcgaatgagggatatacaatgaagtttatcaaatttaacgacagcacgattgattcgtttttgttcatgatgctgactgatctggccaaaacactgaccagaagcagtgaagttgaagtggaatacggcgtgcagtcttactacaatccctttgaaaagaaaatttacatgagccacttttggaaagaccgatcagccggggatatggaagccggcctgaaaagcgatgtctatttgcgcgctgtcggaacacgcagcagctcatttcgggtatttgcggggtttttaaatgacgttcaccggcacttcacccgccaaagctttgccaagcagctgtttatgctgcttgaggatatcagaattgaagagcagatcaaaaaagaacggccgggaacgaaacgtgtttttcagaagcggagggagatgtacaggaaatatttcacgacgcagctgacattgaatttagaacggagcattttcaccgacgctttgtattgcgcgatgtttgtcaagctgacggctgagtctccgcttgaaggcattccttccatgcatgaaaatattgatatgatgataccgtatattgaacgtcagctcatccgggtgtatgaggcggattctacggaacaaatcgcaacaataacggaagacctcatggaaggccttgatgaagtgcttgagaaagatatgctgaacacatacttttttctgccggaacttgattacgaaaaagcggctgaagagcctttattcgaaagcgtaaaaaaagcgccttcgttaagtgacgatctcacgctccctgagtcttccgacggagatgaagaaatccttgaagagaaaatgaatacgtggcaccgggaaaccgaagcgccgtcaaaaagcttccttcaatttgatattgagcacggcgcgaaatcagatcttgggaaagacgcggccagagaaggcgatgacggtgaccaggcgctcggctccgttcaaggttccgcacgtcagacgaaaagagaggattactctaaactggaagcgcttgaatccattcaggatgaacatgagggcgccgggctggctgacggaaaagaaaacaaatttgccttcccggtttatcaaacgcctcaaaaagcgtctcctgaagaggagcagtcttataaagaacaggcaaaaacgatagaatcatatcaaaaacgcctgaagcagatgatacaaaaaacacttgagcacaaaaaaacgctcccgcggaccgaccttcacgcaggccggctgaatcgcaaactgatccgctattttacggaacggaacccgcgccttttctataaaaagcaggacccgtcttcagacattgacgccgtttttacattgcttgtcgattgttcggccagcatgtttgacaaaatggatgaaacaaaaagagggatcgttctttttcatgaagccttgaaatcagtgtccgtccctcaccaaatcgtcggattttgggaggatacaaacgaagcgaccgaaacgagccagccgaatttcttcaataccgtcattccgttcgaagagtcgctgctgcaggctgcgggtccgctgatcatgcagcttgcgcctgaagaagataacagagacggatacgccatcagacaaatgacgaaacagctgatgcggcggagtgaggcgcaaaaatttttaatcgtgttttcagacggagagccggcagcattcggatacgaacaaaacggcatcgtcgatacgagcgaggctgtcatcgaagcgagaaaaaaagggatagaagtcataaatgtttttctgtccaatactgcgatagaagaatcccagatgaaaaccattcaggatatgtacggaaagtacagtatttttgttccggatgtcgatcagctgcccgatgtgctgtatccgcttttgaaaaaactgcttcataaaagcataggataggctttttcctatgctttttcgctttttattttaaaatgatttaattttttcggtattgatctgttttttttactattttgtgaacaatcaaggtagaatccaaacgcaatcagtggtaaaatatccttggaagcgtttttattacataattttgggcacagcgttcaaaagttatttcaagatagtgaattgatcacttgattatctaggttgggggtaatattcaaatgtttcaaaataatatgaaacaaagaatgaattgggaagatttttacggaccgaacctcggctacgcactggagctgtacgaccaatatgctgaagatccagacagcattgatccggatctgaaagacatgtttgacgaactaggcgctccgccaagccaaataaaagaggcatcggaaacaaaggaacagggacgcgtcaccgcagatctgattcaaaagatcgcagcagcagttaaacttgcagaagatattcgaacctatggccatctgaacgcttccgtcaatccgctcagaaaggatccgaaaaagagcgagctctttccgttatccgagtacgggcttacagaagaagaaatgaaagcaatacccgcgtctgtcatctgtaaagacgcacctgccaatataacaaacggcttagaagccatccagcatttacgcaatacctataaaagaaccatctctttcgagtttgaccatgtgcatgatttcgaagagcgcgcatggattacaaaaatggtcgaatccggcgaactgttccggaaaaattcaccggaaaaactgtcagccgttttagaaagactgacggaagtagaaggatttgaacaatttttacaccggacattcgtcggtcagaagcgtttctcaattgagggattagacgcgcttgtgccggttcttgacgacattatcgcccagtctgtgaaggcgggcacaaccaatgtcaatatcgggatggcgcacagaggccgtttaaatgtgcttgcgcatgtgctcggcaaaccgtatgagattattttctcagaattccagcacgcgccgaataaagaccttgtgccgtctgaaggatcgaccggcatcagctacggctggacgggcgatgttaaataccacctcggtgcagacagacagcttcaggatgctgaaaccaaaagcgcgcggattacgcttgcaaataacccgagccacttggaattcatcaatccgattgtggaaggaagcacgcgggcggcacaggaaacaagaacgcaaaaggggtacccggttcaagacgaaacaaaatcgctcgccattttaattcacggtgacgcagcgttcccgggagaaggcattgtcgccgagacgctgaacttaagctcactgaaaggctatcaggtgggcggggccattcatatcatcgccaataatatgatcggctttacaactgaaagcgatgaatcacgatccacaaaatatgccagtgatttggcgaagggctatgaaattccgatcgttcacgtcaacgcggatgatccggaagcatgcctgtcagccgttaaatttgcggttgaataccggaagcggttcaataaagatttcttaatcgatttaatcgggtacagacgatacggccacaatgaaatggatgagccgtcaacgacacagccgatgctgtatgatgccgtcagaaaacacccgactgtcaagcggatctttgcggaaaaactcgtaagtgaaggactgatcagcgaggaaaaagcgcaaaacatcgaaatggcagtgacaaaacgaattgaagacgcctataaaaaggtgcccgccaaaaaagaagacgccgtacgggaaattgaattgccggagccggtgtccaacggttttccagacgttgacacagccattgattttgatgttctccgcaagctgaatggcgaacttatcaactggccggaatcctttaacgtgttcggcaaactgaaaagaatcctggaaagacgtgcaaaagcgtttgatgatgaccgtaaagttgaatggtcattggctgaatcgcttgcgtttgcttccattttgaaagacggcacgccgatccggctgaccgggcaggattcagagcgcggaacgttcgctcaaagaaaccttgtgctgcatgacagcgaaacaggagaagaatttgttgctctccatcacttagacgactgcgcttcttcatttacggtgcataacagcccgctctctgaaggatcggttctcggctttgaatatggatacaacgtgtattcgcctgaaacgcttgtgttgtgggaggcgcagtacggggactttgccaatgcggctcaagtctattttgatcaattcatatctgcaggacgggcaaaatggggacaaaaatcagggctggtcatgctgctgcctcacggttacgaagggcagggccctgaacactccagcggccgcgtcgagcggttcctgcagctggcggcggaaaacaactggacagtggccaacctgacaagtgcggctcagtatttccacattttaagaagacaagcgaaaatgctgcttcgtgaggaaatccgcccgcttgtgatcatgacgccgaagagcttgctgcgcaacccgaatacggtatctgaagtgcaggaactgagcgaaagccgattcaagcctgtctatgagcagtccggtctttcccatgcttacgaaaaagtgactcgcgtcgtattatcaagcggaaaagtgtcaattgatatcagcgatcacttcaacaaaatggaaggcgataaggattggcttcatattgccagaatcgaacagctgtatccgttcccggcaaaagatacgaaggagcttttcgccaaactgccgaacctgcaagagatcgtttgggttcaggaagaaccgcagaacatgggggcatggagttatatcagcccgtatctgacggaaattgcgccaaaaggagtaaatgtccaatacatcggccgaagaagacgatccagtcccgcagaaggagatccgacagtccacaaaaaagaacaggaacgcattgtatctgatagcttgactcgcaaaaactaagggggaaatgtaaaaatggcggaaattaaggtacctgaattagcagaatcaatctcagaaggaacgatagcccaatggttaaagcagcccggtgattatgtagaacagggtgagtacttgcttgaactggagacggacaaagtaaatgttgaattgacagcagaagaatcgggtgttctaaaagaggtattgaaagattcgggtgataccgtccaagtaggagaaattatcggtaccattacagaaggcgctggcgaaagttctgcacccgccccttcagaaagtgctccagccaatgaacaaacgaaagaggaagcaaaagctgaacctgctgcacaagaagtcagccaggaagcacaatcagaagcgaaatccagaacggtagcgtctccggctgcacgcaagctggcaagggaaaaagggattgatctatcacaaattccgacgggggacccgctcggccgcgtgcgcaaacaagatgtggaagcttatgaaaaaccggcttcaaaacctgcggcacagccgaaacagcaggctcaaaaaacacagcaaagctttgacaaacctgtcgaagtgcaaaaaatgtcccgccgcagacagacgatcgcgaaacgattggttgaagtgcagcagacttctgcgatgctgactacatttaacgaagttgacatgacggccgttatgaatctaagaaaacgccgtaaagaccaattccttgagcaaaacgatgtaaaactcggtttcatgtcgttctttacaaaagccgtcgtggctgcattgaaaaaattcccgctccttaacgctgaaattcaaggcgatgagctgatcgtgaaaaaattctatgacatcggtatcgctgtcgcggctgaagaagggcttgtcgtcccagtcgtacgtgacgctgaccgcctgacgtttgccggcattgaaagagagatcggcgaacttgcgaagaaagcgcgaaacaataaattaacattaggtgagctgcaaggaggctccttcacgatcacaaacggaggtacattcggatcgcttatgtcaacaccgatcctaaacagccctcaggtcgggatcttaggtatgcacaaaattcagctgcgcccagtagcaattgatgcggagcgctctgaaaaccgtccgatgatgtacatcgctttatcatatgatcacagaattgtagatggtaaagaagcggtcgggttccttgtcaccattaaaaacctgcttgaagatccggaacagctgctgctggaaggataatttgaaacagacaaaaagtacactgcccttacaagcagtgtacttttttattgagcgaaggggagaatttatatgaaaagctgttatccgcttgagatcgaatttgaatataatgaagaattgcattctatcactccggttcttctgcaagacgaacatgacacgatattaatagactgcggatatcccggttttacaaaccatcttcaacatgctgctgcccggcatggaatgtcgcttcattcattgacaaaaatcattgtaacgcatcacgacatagaccatatcggctcactcgctgcattacatcgtttgcacccggatatcagcgtgacagtacatgagcgtgaagcgccgtatattgacggctctaaaaaatctttacggcttgagcaggctgaatcaacgtttagttcattgccagaggatgcaaagccttatgcaaaacagttcatttgctcgcttcaatcagtcgaatcggctccagttcaccggacagttactgacggtgagctgctgccttggtgcggaggcattcgcgttgtagccacgccgggtcatacacccggccatatcagtctttatctgcctgccgaaaaaacaatgatcacaggtgatgcggtcgtcattgaagacggaaagctgaaacttgctaatcctgactatacgttacatatggatgatgcggtccgatctgtgcagcggctgcttgattacgatatccgccaattgatttgttatcatggaggtttatttcagggggatgtaaaaaaagcgcttttgcgcctgtttcgtgatctgcagaataatcaaggataggagcggcggcagcctatccttgttcagttatgaaaacggaatctttgccgtttcttcttcggcgctgtttttctcttttttcttagaccagtaggtggcaagaacagaccccgacagattgtgccatatgctgaaaattgcgctcggcacggctgacaaaggggagaaatgcgctgtcgcaagcgctgcgcccagtccggagttttgcattccgacttctatcgcaatcgctttttgtgaagcataatccattctgaacagctttgcagtcaggaatcctaacaaatatccgattccgttatgtaagatgacgacagacacaatcagcagtccggattgaagcagatgctcacgatttacgctgacgacagaggatacaatcgctacgatgccgattaccgatacgagaggaagtgcgtgcacggcttgtccgacctgttttttgaagaacagcttcacaatcaccccgaggacgatcggcaaaagcacggcttgcataatggaaacaaacagtgaaccgaaagaaacgggaagccactctttcgcaaacagcataataagtgccggcgttacaataggagcaagcaatgttgagatcgtggtgaccgcaacagaaagcgccgtattgcctttcgccaaaaacgtcatgacatttgatgccgtaccgcccggacagcatccgaccagaatgacgcccgcggcgatttctgcggggaggcggagcccgactgataaacagaaagccgcaagcggcataatcgtaaactgggcagcgactccgatcacgacatgccaaggctttctgattaattctttaaaatcgtctgcttgaagagtaagccccatcccaaacataataataccaaggaaaatcgtcatataagaactgatccaagaaaacaaatcagggcaggcgaatcccaaaccggcaaagacgataacccacaagccaaaggtttggcccgcaaacccgcttatttttttcagccattccataaacacagctccttttacatccaatcaatcagtcagaaaatatgactgacttttctgtactccattataaataatattctgaataattcaatattaaatataagttttcgataaaattattatgtaaactaatatcttcttgactattcagacatatattcttacaattgatttttatactgaaatgaattgggagtgctgaagtgaaagaagctaatcaatggtcatctaagctgggatttattttagctacggccggctctgcaatcgggctcggcgcaatatggaagttcccttacgtagcgggaaccagcggaggcggcgcttttctgcttgtttttattttatttactgttttaatcggactgccgcttttgcttgctgaatttattatcggcagaaaaacacaaaaaaacgccgttgaatcctataaggcgctggcgccggggaaaaagtggcactggatcggatatctcggaatcataacgtgttttattctattatccttctacagcgtagtggggggatggatattaatctacattataaaaggctttacaggcggtttaacgctttcttcgggatttgatacgttatttatcgataccatttcaaacccttatgcagcggttttcggtcagctgctgtttatcgtgctgacgattttagttgtggcaaaaggggtgagcagcggcatcgaaaaggtaagccaggtgctgatgccggctctgtttattctgtttattcttttaatgatccgctccgttacgctgcatgatgcagcgaagggattaaaattcttcttcatgcctgattttggcgcgatggatgccaataccattttatatgcgatgggtcaatcatttttctcgttaagcgtcggagtgtccgtaatggttacatacagcgcatatttagaaaaagaagaaaatattgttcaatccgccgtatcggtgacggtattaaatgtccttgttgccgtgatggcgggagtggcgatttttccggcggtatttgcattcggtctcaagccggatcaaggtccgcagcttttatttaacgtgctgccgaccgtctttaaccaaatgccgttgggcatcgtgtttttactcgcctttttgctgctgtttttatttgcgacgctgacatcggctttttcaatgcttgaaattttagttgctgttttgtcaaaaggcgattcggcaaaacggaagcggtatgcatggatcgggggacttgctatatttattgtcggggtcccttcggcgctgtcgtacggcattttgagtgatgtttctatttttcaccgcagtatttttgacgctgcggattttctggtcagcaatgtcttaatgccgttgggcgcgcttttaattgccgtgttcgtaccgctgaaaattccgaaacagatgctgtttgacgaactgaaaagcggttccggtataaaacgaaaatggtttgcagtctggctcctattaatccgttatgtggctcctgtagccattattatcgtttttctgcacgtgcttggtattttttagaccaaaagaagcaggcccccgttcaagacgggggccttttttaataaagcggccacatcacgcggtgcgcttgctcgaaccgtttctccgcctcccgccaatcaacgacattccaccattgatccacgtaagccgcgcggtcgtttttatattgtaaataataggcgtgttcccatacatccagcggaagcaaaggaatgacgtcccattggctgtagagctgatgcttctcagcggccaaaatctccagccgcccggagcgcggcgcccagacaaggatagcccagccgactccttcgactttttttgctgcttgagaaaattgctctttaaaagcggaatagcttccgaatgacacatcaatcatttgaaagagcgcacccgtcggccgtctttttccgtttggattcatggaaaaccaaaaaatactgtgcaaataatggccggcaccgtgaaacgccaattgccgctcccaatgcgccactaagtcgtactgtttcgtttgtctcgcttttttgagctccagttctgctttattcagaccgtcaacatagctctgatggtgtttagtatggtggagtttcataatctctcttgaaatatacggttccagtgcggaataactgtatggcagtttagggaggacatgcttgccgatcggcacataggctctgcgctcatccggctcttccggttcggtaatgtcccggtaaagtgctgatgcctgttcgtaccattccgcctccgttaatccatcatcctgaagggtgtgaaaaatccggtcgatttgtgccgcgaagcgatcgaaccgaccttgctgtatgacttgttccttcaaggtttcacaccaattcagcatttcggtttgataagcgtgccgtttcatttttcttcctccttttcactcactttcataaaagtgctgagcgcaagcaaagaaaacacatacgggtagctgtgatacctgatgtaaaactgtttcggcaggccgattccggtcggatagctgaaagcgtctccttcgtaatgccggttttcaataagaaaagatatgccttttgtgacggcttgatgatgaggtttttcgtattgcagcaaagcttcggccgcccaagccgtctgtacaagcgtcccgtaagaaagcggaacataggttttgacttctgcgcttttacaggattctccccagcttccgtcctcgttttgaatggacttcagccagcggatcgcttttttcacggccgggtggttttggctcacgccgcaagccttcatccctgtcagcgctgcccatgtgccgtaaatatagcagacaccccatctgccgtaccacgatccgtcctcttcttgatggcggatcagccattggacggccttttcaatctgagggtgatcaggagaaagccccgcttctcctaaacagtgcagcacccgtccggttaagtcgcttgttgaaggatcgatggcagcttcctcagccgattccagcggcagcaggcggaccagcggatgattgacatttttctcaaaagcagagaagccgccgtcactgttttgcatggacaaaagccagctcagtccgcgttcccatgaggcgggataacgttttcgcgggatggctttgagcactgcggctgtgtcatcacaatcaggattatttgtattaatgtttgaaaaaccccatcctcccggttcagcatgcgggttgtgaacggcccaatcagcgactttcgtctgctgccgttcacgcagaaaccgggcggctccggttatcatttgatcgttatctgagatgccgcttttcataagcgcatagctgagaagcgccgtatcccaaacggtcgacgttgaattttccaggtacggtatatcgctgcaagacgtgagcaaagctttcgtgccggcaagcgcttttctgataacgggggagtggcgcgatacaccgagagcgagcaggccgtacaccataaaaatagtggcactcgcatagctgtataatgtgccgtcttcttcaatccggtcaagcatatacgttttggccgtacgcagaccgagctggtgaaaagcggcaggaatctgcaaaagccgcttccagtgcgcgaaaagagaagagaggtctctgttctcatcatgatcggaacgaagccatgtaaacggatttttagtcatatgccgatctaaatgcgcgagagacggaacattgggatttttcagcgaaaatcttttgttaagcgtcacggccatcggtacgaaatgaatacgagcgtatgtactgaactggtaaaaatgcagcgggaaggatgggggaatgactaagaaagataatggcagatgcagcgcgggccatgggtaaaggccgtttgccgcaagcatccactttgtcatgaagtgtacgttgcgcaagccgccatttgagatgataaagcgttcagcctgaatcatatgcgcctcagaacggctatataaaccggaagccagcaagccggcatagccctgtacagtagcggtcacatttcctttccggtcatcaggatagttggcaaaagttccgtccgggcgctgtttagcgcgaatgccttctgcaagctcagcgatcagttctttatcattgtctccaagagaagtgagaaggaggatcagaaaggcgtttgtcaaaatcggaccttcaaaacaaaatgaccatgagccgtccgcattttgcgtttctcttaatagggagatggttttcttttggcggcttctgacgttttcatgaattgtgctcacactcgctcaactccttcagaagcatatatattcatatgtaaaaggcggcatgacaaaagaaagaaactgctgacaggcagcagtttcttgtttgatttaatcttccaggttgatccagacgcttttcacttctgtataattattcagcgcgtaagagcccatttcccgcccgaggccggattgcttatagccgccgaaaggagatgccgcatcgaaaacattgtagcagttgacccaaacggtgccggcttggagacggtcagcaatgtaatgagcgtttttcacattttcagtccaaagtccggctgcaagaccgtattccgagcggttcgcccgctcaatgacttcatcaaccgtatcatacggaatggcggctaagaccgggccgaaaatttcttcttttgcgatggtcatgctgtcatccacatccgcaaatacagtcggggagacaaaatacccttcttcaaacgggcagctgccgcccgcgacagctttggctccttccgcttttcctttttcaatatatgaaagcacgcgctcatgctgttcctggctgacgagcgggccgatttgtgtatcttggtgaaggccggcgccttgctgaagcgatttcgcatatgaaaccatttcgctgacgacctcatcatatttgtctttgtgaatgaagacacgggagcctgcgcagcatacctgtccctgattaaacatgaccccgtttaaagcgccgggaatggctttcttcaaattggcatcaggcaaaatgatgttaggtgactttccgccaagctccagtgtcacgcgtttaattttttttgcggctttttccatgatttttttgccgatttctgtagaaccggtaaaagcgagtttatcgacatcgtcatggttggtcagcgcttccccggccgtctcgccgaaccctgggacaatattgatgacgccgtcagggaagcccgcctgatctattaattccgctaaatagagggcggtcagcggtgtctgctccgccggtttcaaaacgattgtgcagcctgtggcaagggcggcgcccattttccacatcgccataaggagcggaaagttccaagggatgatctgccccacgacgccgacaggctcatggcgggtgtaattaaaatatgagccggcgaccggaatcgtttgtccggttatctttgtagaccacccggcataataacgcatatgctcaattgcgagcgggatatccccattcgtcgtttcattaatcggttttccgttatcaagtgtttcaagctgcgcgagttccgttttgtgctcttccattaaatcggcaagcttatacatcagcctgcttctggaagcggccggcatagtgcgccattcgccgtgatcaaaggctttgcgtgccgctttcactgcactgtcaatgtcttctgtctgtgcctcgtaaagcgtcatcagcgtttctccggttgccggattcggtgtgacaaatgttgatcctgaagcgctcggaacaaattttccgtcaatataaagtttcttcgtaccctgtaaaaatgtttccagcctttttgtgatctgcatcgttaaagaactcattcgtaacaaacctcccgaaattttttatggtctgttttgagcatcttgatgtccgcgcaaagtaagcgcatacagtcattctataataacacccccggtaaaatcaatcgataaccgttattgcaattcacaagaaaaaacggctacaataagcttatcgattaagaaaaggagttttataaatgattcataataattggcagacaaaagaaagcgtcaaaaaggtcaaatgcgtacatacagatgcgaaaaaatacattgtcaaaaatgtgctgacgccgggtaaagagtatgaagtcaaaaatgaaacagaagaattcatttttgttgcagacaatacaaacaaagtcggaggcttctacaaagagtattttgaagaagtttaaggctgaatgaattcattttgcctgagccatactaaaaaagactacatataaagggtggctgcaaaatgaaaaaaacagagcaagacaaacaaaataaaacatcagatcagcttcagcaagtgcaacctgaagaaggcaccgacacgacgatggaacaaatttcagatacctataaagaaggaacaattgaagatacggatcgttgatgttttgttgaaaccgcggcattggagaagccgcggttttttatggcgaaaataaaaaactgacttttcgaaaaaaataccgttttcttgaaaccttttcttccgctgaaccgtattacttcataactgcggcacctttcgcgaagggcttttttgatgaacgttctaaaaatgtaatctgttcgtaatggtttaaatgccgtctatgtcgtattcttatatagggataaagaacttattttttatgattgtaataaaacaatagtatagaagcagaaagtggggttcttcattgggaattttttctgtcagcagatcaaccgacacaaaaaagctggaggctttgctcgttgagggagaacggatcgaaacgatttataaactgcgggttgaccaaatatgctttacgaataaacgagtgattttctttgataataaaatgttctccaaaaagaaagtgcgcgtatttcttccatataaaacaattgaaagcttcgccattcaagaagcggggatgtttgatcccgataccgggcttgtattaatgacaaggggaaaaactttcgaattggaatttgcaaaagaaacggacttgactgaggttcaagccatcttaacaaaatacttatgcagttaaatatcacataaaagccatccgaatgcatgcggatggcctttttattatataatgcttgtttttccggagttcgaatcaatgagatccgggtcagcgatagaactgatggggatataaatcggcgccaaatcaccattttcttcaccgaatccgtagttgatcttattggataaaaaataatcgatttgctgatacgggccgatcgtaatggaagaaccgcggtcgaccgcatttactttaaagcctcctacatttaccaaaaccggcgaaaacatcataatgggcctccttttccggcagggattttgtcgcatgcagactcaaaggttgatggagaatcaatttgatcccggtcatccactttgccgttcgtgccgatgaagccgcttgcatctccgaagttctgtccgtatccctgattctttttatcagaattctgccattccgccagtaaattttgtccgacattcaccgctgaagcattttcaaaggaattaattttcaacatgaaaatattaatattgatatatggagttggttgaaccacaggcaaacctcctttaatacaggtgtatgccggctgttatgaccgtatgcttagacagggggcgataaaaatggatttcgataagatgaagcaatggatggaaatggcgcaaaacatgtccggcggcgacttttggaaaaacgtttttgatgatgaacaactgaaatcatttcaaaacggccattctcattttccctttcaacagggagatgggcaaatgagaagaaatgaggatgcttttcctcttatagatattgtggaaacccatgatgagctccaatttttgctgtatctgcccggctaccggaaacaagatgttcagctgttgtcctacggagaatatattgtcgtaaaaggcacgagaaaatcctttttcaatgaacaggattttaaacagaagaccggaaaatacggcgattttgaaaaaaaactcgatcttccgcattccgctcaaggtacgaagggaatgcaggcggtattcaaagacgggattttatatatatcgattgctaaacatctgggggatgcaagccagatcattatcgaaggctgatcttgttcgctgtgccatctatcagatctgaatcatcgatactcatgatagggatggcgacaacggtgcaatcaccgttttgttcaccgtacccttcatttcttttattggctgctgtgtttctcaccataacggaagagccggtgttaaaagccgctccgccgctgattccgttcatttttatatactcaaagttgataacggatggaaaaaacatcatgattcgcctcctttttgtatatcatgtttatatattcgcaatacgggacgcatagaactttccaagagtgacggggaaagaagtgattttctttgaaaaaaataatgaaagagattttcaaaaaagtgtgtgaagaagaattagaccggcttaagaaagtggaacaacagcttgatgagcttcaggataagtgtcattttgagccgcaaacggttgaaggggaaaaaacatatgtccatattgagcacgtcaaagtggacaagattgaatacaatattgattttgaacagctgagtatagaagagctgagcggtatgctgaatatcggcgccacttaccatacaccggcgcacaggctcaaacaagcctgcgctgaagaaagtcgggacaacccgcaaaatgatgctgcgaaagaaaaaagacagacaaagcagcagacacccaatgtcaccatcagggggagaaagcattgacccccattgtttcatcctcctttttcgagggtatgtattaacagatgcagcgaagaatacagacgaaaaaggagatgatgaatatggcattatcaaaagaacagcaggacagcctttatcataaattaatcgatttaaaggaaagtcttcagggagaatccaaagaaaatcattcaatgagcgaagacacaggagaactgtcgaacggagtagataatcacttagctgatcacggaagcatttatttggacagggtcacgaatcagacgctggacggtgtcgatcagaatcttttagatgaggtgaacgccgcgcttgaacgaatggataaaggaacatacgggatttgcgagaaaacgggaaaagaaattccttatgaaagacttgaagccgtaccgtacgccagaatgaccgtcgaagcgcagcgagaaacagaaggggatgtgaaaacagacgctccgtcatatgaaagggaatttcacgagcaggtgaaagacctctcaaataaagaaaccgttgatcaaaaaagctcacaaacttacgaaatcctggatcgcgagcaggattcacaataatagcagcaggtacattcatatgtacctgtttttttattccataaaaaatctcagaatcgaaataaaatcattgactttatataaaaaagaaagtaacatactatttgtaagtaaatattaaaagattaccgggaggaatttagaatgtctcaagtattatttgtaaaatcaagcgaccgtacggctgaagaaggcgtatccgtaaaattatacgaagcgtttctggctgcttataaagaaaacaatccgaatgatgaagtgatcgaacttgatcttcataaagaaaaccttccttacctcggaagagatatgattaacggaacattcaaagcttctaaaggaattgaaatgacagacgaagagaaaaaacaagcgtcaactgctgacatttacttaaatcaatttgttaaagctgacaaagtcgtgtttgcattcccgctttggaacttcacagtgcctgctgtgcttcatacttatgttgattacctgtctcgcgcaggggttactttcacatacacgcctgaaggccctaaaggtctgatgggagataaaaaagtagcgctcttaaacgcacgcggcggcgtatattctgaaggaccgatggcatctcttgaaatgtcattaaacttcatgaaaaccgttcttggtttctggggtgtccaagatcttcacactgttgtcgttgaaggtcataatgctgcaccggataacgctcaagcgatcattgaaaaaggactgcaagaagcgaaagatctggctgcaaaattctaattgccataactcttgcgcccctacagggtgtgagagttttttctattatagaagaaactggcggcagctttcgattcaatcttatattgatatattgatattttgtcgaaaaaacaatttttatgtagaataaagcatttttcacaaagaaaaaaggttttctgtaaaagaattaaccctcttgccaaaatacgactgatggtgtaggatataagagaagctacattgttcgtattgttaattaagttttaacctttaagctgtaatagggagttttatatcgaagccggaatgtcatgcctccattgcagaggacgacaggaacgcttctgcaaacacccactttgaggagtggtggtttaaaactttcttacttgcgtacggcatacgtagcgaaagccatttcccttgcggagatggctttttattttgaattgcccttgagcagcgtactttatcagtatgataaaatgaaagaatcaaagacaaagtgaggttttacaacatatgctggataaagcccaatcccttctggcgcattattttggctacgacagtcttcgcgcgggccaaaagcaggcgatacaatcagttgcagaggagagaaaaaacacggtctgcattatgccgacggggggcggaaaatcaatctgctatcagattcccgcactgctgtttgaaggaaccacaatcgttatttcccctcttatttccttaatgaaagatcaagtcgacgcgcttgaagaagcgggtatcgcggcagcttatattaacagcacccagacaagccgtgacattcatgagcgcctgaccggtttgaaacaaggggcttaccggctcttttacatcacaccggagcgtttgacttcttctgaattcattcacatcctgcagaatattacggttcctcttgtcgcaattgacgaagctcactgtatatcgcaatggggacatgatttcaggccgagttaccggaatatcgaaatcctttttaatgaattaaaagaaccgcccgtcatcatcgccttaacggcgacggctacgcctgaggttcatgatgacatctgcaagcagcttcatattaagaaagaacaaactgtatataccggttttgccagagagaatttaacgtttaaagtagtaaagggcgaaaacaaagaccggtttatcgagcggtacctcgaaaaaaataaacacgaagccggcattatatatacagcgacaagaaaagaaaccgaccgtttatatgagaaattaaaacgcagcggcatcaatgccggccgttatcacggcggattggcggatgatgacagaaaagaccagcaggagcgttttcttaacgatcagatacaagtgatggtagctacgtccgctttcggaatgggaatcgataagagcaacatcaggtttgttttacacgcgcagattccgaaagatatggagagctattaccaggaagccggacgggccgggcgcgacggtcttaacagcgagtgtgtgctcttattttcgccgcaggatattatggtgcagcgttttttaatagaccaatcggccgccggagaagaaaaacaaaagcaggatctcaaaaaactgagacagatggtggattactgtcatacggaagattgcctgcagcggtttattctgaagtatttcggcgagaatgaggcggaagcttgcgaagcgtgcggcaattgcactgatacaaggaccgcccatgacgttacaaaagaagcgcagatggtattgtcatgcatcatcagaatgaatgagcgcttcggaaaaacgatggtggcgcaggtgcttagcgggtctaaaaataaaaaagtgctggaaaacggcttcagcagcctgtccacttacggcattatgaagcatcaatccgcagcggaaatcagtgattttatcgaatttcttatttcagatgaatatatcagaatggcggacggcacatttcccacgcttatggtcacccaaaaaggcagggacgttctgcttggaaaaagcgcagtcgcgagaaaagaagccttacaggccgccgccgtcaccgaaaatgatgaattatttgagcttctccggcgtctccgcaaagagattgcagctgaacagggtgtgcctccatttgtcgtgttctcagatcagacgttaaaagaaatgtcggcgaaacttccgaaaacagatcaggatcttctttccgtaaaaggggtcggggaacaaaaaagattgaaatacggagcggtttttttagaagaaatccgaaattatgtaagagaaacagagtgaaaaaaagtttttttagaaatttgcacattgtgtttttcatgggcgccggaaaaatcagaagcttgaaaacccttgctgtatcaaggtttcagcaagacttaccaagcgagagaaatgtttcatgtaaaggaactgtaatctaattcaaatcgttttgttattgaactgacattttcatatgttacgatatcacctgttagccgccaataaaaagctaacaagggaggatttacttatgaagaagacgattatgtcctttgtcgcagttgcagcaatttcaacaactgcatttggagctcacgcttctgctaaagaaatcacggtgcaaaagggtgacacgctctgggggatctcgcaaaaaaacggagtgaacctaaaggacttaaaagaatggaatcagttatcttctgatttaatcattgaaggagagaaactgactatttcttcagtagaaacaaccacatctgggcagtacacagtgaagcagggcgacagcctctggaaaattgctcagaaattcggaacatcagtcggcaatctgaaaagcttgaataacttgcaatcagatataatttacgcaggcacaacgttaaatgtgaaaggtcaggctcaggctcaggctgcacagccggctcaagaagccagccagccgcaaactgaacaaaaaccagctgctgagacagaacagccgaaacaagaagctgtcaaaaacgagcagcctaaacaagaacctgttcaagaacaacaacaacctaaacaagaagcgaaggctgtcgaagcaaaacagcagcctgttcaatcaaatacaaaccaacaagagcctaaaaagcagatgacaatgactgcaactgcttactctgctaacgacggcggcatttccggtgtaacggcaaccggtgttgacttaaacaaaaaccctgatgcaaaagtcatcgcggtagaccctagtgtcattccgcttggctctaaggtttatgttgaaggttacggagtggcaacagcagcagatacaggcggcgcaattaaaggaaataaaattgacgtatttgttgcaaagaaaagtgacgctaacaactggggcgtcagaacagtaaatgttaaagtattagactagtttcatatagagatgaagaacacaaggcgaaatgctttgtgttctttttttcttcccttttttgactgtatataatcgttatatgcggaaaaagaaaaagcgtttctctaatataataaggaatggatgtgaaaaaagaatcggaagggatgaatctgatggagccggaatgtatatgtttatggaataccttcacagaatcaccggtgtttcaagcaggtatatgcaccgctttcgccattgtgctcgttatcggactgtctatgcctgctgtcaggctgtttcaggcgcttgacagagggagaggaaggccagccgttattgaaaaggtgagacgtactggcgtgatgaagaatggcaggcacgagcttgtacttattttaaacgtaaaaaaccaagacggaacgcatgataaacgtgaactgacacacgccgtatataatgaagagatcagccgtttttatgaaggagcttccgtatgggtgagggcagcggctggcggacgaattatgatcgctcctcgcacgccgcggcataaggcgtcaaaataaaaagacggggcggttttcccgtctttatgtattaatgccgatcgatccatatccgtccgccttctgagccggcttctatcctgcatgctcctccgatcgggaatgtcatcaaaggggaggtatggccgaaatcagcatttgcgataacaggcatggatgacagttcttcttttgtacggatgacggcacgcagagcctcctcagacacatttgaagcatgctggaaacgtccgatgacaattcccttcacggctgaaaaagcgggaagatggatgagtgactgcaaatcccggtcaaacatatgaatgtccgacatatgatcatcttctataaacagaatcacttgttccatctccggaaagtattcggtgccctgcagaagattcagcgtgcatagatttcctccgatcagtgttccttccgcatatccgggctgaataacgagcggtcccggattccgataaaaacgtctgtcctcctggttcaaataccatttatcatcactccactcggatgaaggttttacctcatacgggttgtcagaagcacagcaggccaagaaagagtcaatcgtatagtccagcccttttttcatggcaaatgaagaaaaatggggaccggaatatgtaataaggccggttttttgatatatggcatggccgagagcggtaatatctgaatagccgcaaaggattttcggatgccgcttgatgttttcataatcaacgtagcggagcagctgatttgattggaacccgccgagtgtcgtcaaaatcgctttgatgtcaggatcagcgaaagcttcgtgcagatcccgtacacgcgattcaatcgatgatgaatgaaattcatttatttctttcgcattctctgaaaaagagacacaaaagcccagctcctccaattttgtcttcgcggcatttatattttcatctgacatagcggacatgcttgtggccggagacacaatacggatgccgtcgccttttttcaatttttccggatacaaaaaaaaccctccttaaatggtttaatctattacaccatattaacgagggtttatctatcattttttacaggtcgacccatttaatgccgcctgattgcgtatcattgtcaatccagacatcaaattgatgcttttcataaaaatgaacgagccggtcgacatgatcccaatcacgcttagcgatgtcgcccgtcactttcgggatattctgctctctggcgatatgttttaaaaatttcatgcagatcgagccgtagccgtggttcggcgggcctttaatatccccgatatgaatggcattgtcataataagaagcgatcagtgaaaaacagcctcttccccggtaggctgattcacaatcagtcagcataatcttacatgtttggccatcatcaatcgaggaaacaatgatccaatcgtcattgttcgattgatcaataccaagcactcgcgcgtcttttgatacatctatcagattttcccgcattctgaaaatctgaaattcaagtttatgaagctctttttccagctctttctgatctctttcttctgcagtaaacaaaatcatactcctttcacagcgtaaaagtcttagtcaaacacaagtatccattgtagtaaatgatgtcttggtttgtaaatgggttttgcaaaaacttttttagaaaagtctgccgtttatatgtggattgacgtttttaaggcggtggggatagggaaaggaacagtgagcagcggaaaaaggaggaatctataatggcaattgactcactcatcggcaaattgaagtacgtaatgacggaatctcctgataaaatgctttccttatatgtaaatacggatatgagaaatccggatcagcaggggggagagtggaaaatcgccttgaaaaccggttttcggagattaaaagagtatctgtctgtaagtgatccggaagaagaaaaatctctcgtccgcatcatgcaacgtgtctatcaatatatcgatgggcttggtaaagagatgccgcgaagcctcgtattttttgcatcgggggaaggcggtgtctgggagacgattgaattgcaggtgcctgtcgaaacacgattttattgggaagaaacggctgtccttgatcaattagaacttctccgtgaacaatttccaagcacggcttttattctcacccagcagaatgaagtgaagatcatagaaaccgtactcggaaaaattgaaggggtggagcattatcaatacgacgtcatcaatgaatcgtggaaaccgcaggatgtaagcggaagctccgcatcaatggacgaagacgccgccaaagcccatgtcgaagaaaaccaaaacaggctgtataaacgattggcttcaaaccttgatcaaaaggccgcttcacaccaatgggagcgtctcgtaatcgcaggggacaaagaaacagccgatattctcgatcagcatatgaataaaccgatagatcggatcattccaaaaaatctgttgaatgaaaacgaacataaagtgatagaagaactgttgaaggaagcataatatgacgaaaggccgggtctcaaacacccggtctttttagggcttaagtttgtctaatttctgacgaagcggacgaaaccgttgacatcaaagctgaattctcataccatttggatagtcagtaaaattgagagaggtcataagatgaatcagacagaaaacaaacctaaaagttataccggtatcgtgctgacattgaccgttttgatcaacgggttaattgcggtgctgttttttatgccgaaatcgggacaggtcagcattgccaatattcatattctgccgatgttaaatgctatttttaacagctttacttttatctttttgctggcagcgctctttatgattaagcaaaaaaatattcaagcgcataaacgctttattttggcggcgtttacgacgactctgctgtttttgatctgctatgtcgtgtaccactcgatagctgagaatactttattcggcggccacggcatcattcgggggatttatttctttattttgattacgcacatctgtctttccgccgttatcgtgccgcttgcgctgtttacgctgatcagaggattcagcatgcaggtggagcgccacaaaaaaatcgcgagatggacgatgccgctctggctgtatgtcagtctgacgggtgtcattgtatacttaatgatctcaccgtattattaaaaaaagccgtgctctgcgcggcttttttctattgatggaaaaaggcgcctcatcagggcgccttttactcttcaagcgtttcaagtgttgttacatttaaggattgttcaacggtttttgtttttgcttttactttttctgcgtacgtgtaatcaccatagcagtagggataacggaaattgtctttgttccctccgcaagtgtaaagtttcggattctttttgacctgctgctcggagtattgttttgccagttcctcagtatgcgatcctccatgttcagccacaaaatcaatatagccggctcccatgttgtagctttgtataatcgtatccaagtctacgccttttttcttgcctgtttggtacatgagagtgaattgtttgattccctgtttgatactggtttgagggtttttaatctcatttcgctttaaacccagagattctgaagactgcatgggatcatttcctcttccttttgactcctgatatatcatgccgagtacaagcgatgtatatttggtgagtcctttttcatccagctcgtcttcaacaagcggtttgtaatctgtcagccgttcaagcacgatcggtttgacatcaaacggaagacttttgagccattcattatttgaaaataacagaatgaggaagaaggaaaccatgacaaaaacacatatcatcataagacccgcggcagcgaaacagccttttttctttttctccactgtgtttcaccctcaatttcaggagcattatgactttttcattatgacacagatggatgcgcgaaaccaagcggaaacccgtatttgaaacataaatttaaaataacggttcttttgtcaggcgcaggatgtatctgcatcaattgacatttggtataattgggctacttgagaaaagaagggtgaggtatatgactgaatttcacgaatccggaaagacgaatgaccccgctgtcgatttagatgaggaaactttatttttggttgcccagacttttaaggcgctgtctgatccgaccagaatcagaattctccatttgctgtcacagggtgaacacgcggtaaatgatatcgcagaaaagctgaatttgctgcagtctaccgtttctcatcagctgcgttttcttaaaaatctacgcctcgtcaaatcacgcagagaaggaacatccatctattattctcctgaggatgaacatgtgttagatgtgcttcagcaaatgattcaccatacgcggcacgattaaaaaacatccctgctttttagacagggatgtcagccgtactgactgttattggtttggtctctgctcgtttttaaaacataaaaagagaagccgctgtaataaactgcgatgaaataaaagatactgatggtcagcggatcggccccgaccgtttggctgtatgcctccggatgggtaaagtccgctgtgacccggtaaatttcaataacgcgataaacaaatctcgataggaaaaacgttaatagaataagttcaatccacagatgagtgcgaaaatacatttttccgcggcgttcttcaaaagaaatattccgtttggcaaacaggaccagaagccagccgcaaaaagtgccgaatataagatggccgtataaagccgggtgtgtgatgctgaaaaacgccagagctgcggccagcaatgaaaacaaaatcattcttgtataaagccagcggggtttcaaaggctgaaagccgacggaccgtttcacctttttatacagaaaaaaggcaatcattaagacagggcagatgctttgaagtgtgatatgcatggtgtgaaactccccctccgttgagtagtgtatgcttatccggctggttttagtagtctgatttattcgcaggctgaaagcatcttttatcacagtatgcgcgtttcttttttttgcataagagaagcgcccgcgcctttttcaggatttaaacagaaaactcttgataaactaacggtattagttataataaaactaacgatattagttttagggggatgttgatgagaatcttacaatacggaagggtttggcagctgactttttttccagcgcttttcccggtgaattgttatttggtcgaagaagaagtaggagtaaccctgattgacgccggactgcctaacagtcataaaggaatcaaacaagcattgcggcagcttgggaagccgctgaatgacatattactcacccacgcgcacggggatcacatcggttcgcttgactcattagctgcggaatttccggatgcctccgtctgtatttctgagcgggattctttcttgctgaaaggtgacacttcattatttgagcatgaagcacaaacgccgataaaggggggagtgccgaaaaatgttcagaccgaacctgatcgcctgctgaaaggcggcgagcggatcggatctttacttgtcattcccgctcccggtcatacgccgggaagcctcgcttttaaagatatgagaaatgatatgctgatcgtcggagatgcctttcaagtacggggcggccttgctgtttcagggaagctgaaatggaaatttccgtttccggcttttgctacgtggaataaagaagaagctgtaaaaacagcaagaacgcttatcgctcatcaaccaagcagtctggccgccggacatggaaatgttctctgcaatcccgttgaaatgatggctgaggctgctgaggaagctgaacgaagcctgccgggaggccgatcataatgtcaccgagagtcggaatgagccttgacatgatattgagagccgcagcaggcatcgctgacaaaaaagggctgaacgaagtgacgcttgcggccgttgcaaagtccttaaacgtaaaaccgccttccctttacaattttgtcaatggccttcaaggaattaaaacagagctggctgtctccggtttaactatgttatttgaaaaaatggcggcctctgcagaaggactgacgggtgaaacggctttgctcgctcttgccgatgcctatatcaatttcgccgaagccaatcccggattatatgacgcaacatttcaaaagataaaagacggccggattgagaatctgtcaagcctgcttgtagagcttgttgtcaggcagctgacagctaacggttatgcacagtctgacactgcgattcatgctgcgagaggactgaggagccttcttcacggctttgccgtgttgagaaaacagagtgcatttgaattaaccgaatcaattaaggaaagccggaagtttgcagttgttgctttcctaagaggtttacagggtaggtaacaataatattattatgtaaactaaataaaaaaacgcatcagtaaaaggagggacaaatggattcattacaacatatcatttgtgagcggcgcacctattcacatatttttgattctcatgcacacacatactgccaaatgctctttccgctcgaaggacagctggacttggagacagaaagacgtgaaatcagattaaaacctgatcaaatgctgtatattccgcccgggcatgaacatcggttccgttctttggagcgaaacgaatgtctcgttctcgacataccggcatattttttcaaaggttcatttgatcccggcgttctgaataagcttgattctttttggacatcgattcggtttctgctgacagaagagactaagcagcagtcggctcattcattgagtctgcttgcagaatatattgctgaaaagatacaagaaaaccgtacgaatgattcaattgcgtatatccgccgaaatctctcaaagactttttcaattaaagagcttgccgcaatggaacattaccacccggcgtattattccgactggtttaaaaagcagacagggaaaagcccgcaagcttatattgctgagctccgtatgaagaaagcggaacaaatgcttattgaaacaaaatgccggctgacagacatcagtcaggaggtcggctttcaaaatttgtcttcctttaccagatggtttgtcagacataagggaataacgccgcgcgtcttccgaaacacctttcaatctgataaataatcctgaaaatcagttaaataaactgcgtctttttttggtatcatgattgtaaaaaaggagtttttgatatggcagtcatcgaagattttatcaagctcgatctcagaataggaacggtcgtaaaagcggaagtattcccggaagcaaaggtgccggccattaagatgacaatagatttcggcgaagagatcggcatgaaacaatcaagcgcccagattacaaaacggtacgaaccgggtgatctgacaggcaggcaggttaccgctattgtcaactttccgccgcggcggatcgccggatttaagtcagaagttctcgttcttggcggcatcccggaaaaaggagatgttgtcctgcttacgccagagcagtcagtaccgaacggaacgaaaatcggataataaaaaaagacgtttgcagaagcaaacgtcttttgcgtattgaggcgatacaccacacgccacattcgtgtgtgccgcaagggcatgtgcatcggcttacacaattcagctcatcgctatatgaatatagcatggccggtgtggaaatgcaagagattttttaatatatgttatatctggctttgttttgccgatccccgattccttcgtgtaaggttcgtttgaaattttatgatcttgaataaagcagttcgacaaatgcaagagggaatttgagcaagttgtgaccgaagtgtgacctggaattaaaatccgggtctttttgtgtaaaagatgcatgcgaagagaccatataggcattaaatgttattactgatgtcttcatttatcttttggctaagtttctgaaccttctctttaacatttgaaacagctcttttttgaatttcatcaaagttctcctgaatatagtccatgacacttcttattataacttcactttcaaaattgaatatctcatttatttctgactgttcttcatctgttaggtgatggtattgaagttgtttagcatttacttcagcagctgcatcaatcctaacttagttgttctggctgtacaatttcatattcaccttctgcatacttttgctccgcataatggtctccccattgacagagctcctgcaagataggtttaagagattctccaagttcagtggatgaatattcaaccttcggcggtacttggttatacatctttctgctcacaagtccactggcttcaagctctctaagtgtttgaatcagcattttctgagttatatttgggataatgcgctttaattcactcgttctcttcggtccattcattaaaaagtataatacaaggcctttccattttccgccaatcacttcctttgtcacttcaaacccacagctaaattttttcatgtctaaagctctccattccacatttattactttttagttactatatcacaaaaaagtgggtacttccgataatgtgcttactgaaggatactattacttgtaagttgttcttcaagtacttaaaggtactagacataaaataatattaattctaaaggagtgttaagtatgggtgaatttgaaggtaaagtagcgcttgtaacgggtggaacaagtgggattggtcttgctgcagcacaaaaatttgtaaacgaaggtgcatatgtttatatcacgggacgtagacaaaacgaacttgataaagctgttaaccaaattggcaagaacgtaaccggtgttcaaggtgatatttctaagcttgaagacttagacaaactatatgacatgataaagcaggaaaaaggtaagttggacatcctttttgctaatgcaggcatcggcagctttcttccattaggtgaaattactgaagagcaggttgatagaacgttcggcattaacgtgaaaggaaccatttttactgttcaaaaagcgttatcactattcccggacaaagtaggttctattattgtaacgggctccaccgctggatcaattggcaacccagcatttagtgtatatggagcatctaaagcagcattaagagcactggttcgcaactggattcttgacctaaaaggtactgaaatccgtgtaaatgtggtaagtccaggagtgattcttacacctgcatacgatgagctttttggtgatgcacttgaaggagcgatggaaaatgccagaaatactgttccagctggaaaagttgggacacctgaagaagtagctaacgctgtatctttccttgcttcagacgaaagcagttacttgacgggtattgaattgttcgtagatggcgggctagcacaggtataatttcactgcgcagaggttacaaatcttccccaaaaaaggttaatggggatttacttgaagaagccgtataaaaaagtcgttttccttaaaggacagggaattcgacttttttatgtttgaatttgattaacgttgtaaattcgcattttcctggggctgccactaaatgacctgtaaaaaagattactttgtgaataaatgtacttaaagtaacggaaaggagaatgtccagttgttatttggagtgaattcggtggctataaagaacttaattctgcccattttataaagttcttttatgaaagacttcatgaaatgaaagaaaatcgggaagaagatgaagactaagacgattaataaaagaaagctctcttttagagagcttttttcagattttcaatttttaacaggctttataatgagcaaacaggcattactcaaaatactcgccgcgcctatccaaagcagccattgtgttgcggtcagccatgaggcagttaggataaagagtccaatggcaattgatatataattgccggctcggtccagtttacgattgcaatgaagtttatatttagcatgagaaataaattgatcaattttatctttcagctcatagcatttttccttcatcttatcctcagtttcttttacttttcgataaagcatattattcatcgtttgcactcccatatcgccgttttgaaaattcagccatgattttttcttcatagtcatctgagatggattgtgcctggtcttcaactttcaaatgtgctttttcttcaaaaccgtcctgttcttcaccatcaaaacgataaagtttttgcaatagcctccagaatgtttcaacttcttcagttgtgaactcatgaaacatatccgctaaaaaataggtggatctttctgaacaggaaattaacgctttttttccttcaggggtaatctcaatattgattgcacgtttatccagtttgcttggcacagtgtgaacatatccttttttcgagagacttgaaattaatttgttagcggtttgttttgttgtgcccagctttttagcgatattcataagtgtggtatcttccgtcggtaaatgggcaatagcaataagagtcatgtgctgtcgggaagtcaacatttctaagtattcgtccccccgagtctgcaccttattgacaaccgaaaataatgatgcgtaactttgttgcataaaatgcagttccttcattagtaatttaatatccataagttatctcccatctaaattgtcaccatgttgacaattacaatatacatcacgaagggaaataagtcaacatggtgactaatagggcgggtacggctgttttcaaaaatgccacagacagtcggagtgtttacaaaaggggaaataagtataataaatgcgaaaagggcattaatccaaagtgggaaggtgtttgacattcagaaagtgaactggtcagaacggtatgaatggttcaataaacaagatgaaaaagatgggcgtttaatggcgttccttcgtcatgagcttacatatgaggaagtcatacggttatataagaaagggttttatttgaaatcaaaagaaggggatgtttcgttacgtaagaacgatatctgtcgtatgtttggggttgaagagaggcagtggggcaaatcttaatgaacgggaagagaaaaactcttcccgcttttcatagcagctgttattctttttccagcatggaagtcagccattctcttaatgccggtttctgcacataccgctttccgtttctcgtgatatgcggaatgtcagatattcatgaggatcaggtgagttaaagttttcaatccgtctccgatgaaatatccggctaaagcgattccaatgccggtaatatatccaaacctccaataaacgttatcattttttatacggtgaagccggccggaggattcagccttcagcaaaaccgccgggcgtttattgcggacggttttgattgctgagcttttccacctgcacctttccggagaagaaaacagcacctccgcccatatccgccagccgatcgggcgtgagtgaattgacgagctgttttttatcatccatatcggcccaaagaccttggctcaccgcaacgccgggaagcacctgttcgccgaccgaaacagtcaattcgcactctccgcggtgattccaaactctaacggtttctccgtcttctatgttccggtgtacagcctcttctgtatgaataaaaagttttggcgctttttccagttttacgtgtttttcgttatttgaaaatgtcgaatttaaaaaattatgattcggtcccgggacaaataaaagcggaaaatcgtcatcgctctcaagagggatgtgtgtcggcagcgccggataaccgtcctgtttcatcttttccgaatataattcaattcttccgctcggtgtcttgagctttcccggaaaaagcggttttttccgtttggctttcatgaaggaatggcttgagagcgcttcgtaatcaatatcctcgatatacggattgtcgggaaagtccagcgcctgtctgattaattcttcatcagaatcctgaagctcctgctcggtaaatcccattgctccggcaagcagacggaacacttccgtattcgatttgctgtctccgtagggttcgatcaccggtttttgcagctgaataaaatgatgccagtaagacgtgtaaaaatccgtgttttcaaaagcggatgaagcagggagcacgatatccgcatatttggcggtttccgttaaaaacagatcgtgaacgactgtaaataaatcctcccgcagcaggccttttctgactttattcgcttccggcgcaaccactgcgggattcgtaccgtaaataaacagggagcgcacgggcggttttgtttctaaaagaacgcttccgagcctgttcatattaaatgatcgcggcttccggccgtaaagcagatcaggccgctggagcgcttgtctgttatagtttaataccgcgctgttgtgcttgattgcgcctcctccggtgttgagccactgtcctgtaacagccggaaggcaggcgacggtgcggacgatcattccgccattgtcatggtgctgaatgccgtttccgatcctgataagggaaggggaggtttccccgtacattctcgcaaggcgtctgatatcgtcggctttaacgcctgtaatagcagaaaccgtttccggatcatagtgtttgacatgcgcttttaattcgtcactgccttcggtgtattctgtgagaaatgcttcatcgtgaaggttctcagcgaataagacatgcatgataccgagggcgagtgcggcatctgtgccgggacgaatgggaataaaccaatcagcaagccggccggtttggttcttatgtacatcaataacgacaatcttagccccttttttccgggctttttgagcaatcatgacttggtgcatattcgtgctgacggcattgattccccaaaaaataaagagcttagcatgtatggtctcctccggatcagtacccgctccttctcccattgtatagttatagccttcagaaccggctttgctgcagatcgtccgttcgagatgactcgctccgagacgatggaaaaaacggcggtccattccctctgccgccagttttcccatattgccgtaaaagctgtacggaagaatgctttccgctccttcttcggcaataagctctttccagcgcgaactgatcgtattgattgcttcctcccaggaaataggcgcaaacgcggcttcaccttttttaccgatcctttttaacggaacggttacgcgcttctcatcataaatacgctcagccatgtgtctgactttgttgcaaatattccctgatgtgaccgggtgatcggggtctccctgaatgttaacgatttttccgtctttttttgtcacaagcaagccgcattgatcgggacagtctagtgagcacaccgacttaaagaccccgttcggctgtgttgcagcagaattcatagcccatttctcctctttgtttatattgtaagcattataacatttcaaaatcgaacgtcaattcagaaaaaagtgttgacattacggaaagacttttctatgatgagtttattcttttaaacagcctgacaatttcatcattttattttctatccagagaggtggagggactggccctatgaatcctcggcaacatttattgtgccaattccagcaagcgtatgcttgaaagataggaaagaatggtctatacatatttgtgcgcttcaagcgtataaagacggtatatgaatctctttccttctttgaggaaagagatttttttatgaaaaaatttatgtgaaaaggatgttttgcaccatgacggttttaattaccgcgccatatcacgacgaggggctgaaggagctggctgagctgttcggccggactgtgcaccggccgtggaagaagcacggccgggcctatcgggaagatgaattgatccggatgattcaagagacaaacgcgtcggggcttataaccgaacttgatgaggtgtctcagcgtgttattgacatattgccggattccgcttttatcggtgtctgcagaggaatgccgtctaatgtggatattgcggcggcgactaaaagaaaaatccccgttttctttacaccggcccgcaatgcccaggccgttgctgaaatgtttatcgggaatgtgatttcatttttgcgtcatacgtattcttcccatcagtggctgaaggacggaaagtggaatggtgattatttgcaggcttacgtcaaattcagaggaaatgagctgacggggaaaacagtcggccttatcggtttcggagctgtcggacagagaatcgccaggctattggccgcttttgactgcaaggtgctttactatgatccatttgtccgtcatgaaaaccgggagtatgaaaaaacgacgattgaacgggtattttctgaaagtgatattgtttccgttcacttgccgcgcacagaagaaaccatcggccttatcggcgcccggcactttcaattgatgaaacaggaagctgtttttgtcaatacgtcaagagcggcggttacagacagggaagagctgctgcgggtgctgaaagaacggcggattaagggagcgatccttgacgtgttttatcacgaaccgcctgaatcttctgattatgatttgatctctttgccgaatgtgttcgcgactccccatttagcgggcgcaacatttgaagtggaagatcatcatgtgaagattttaaatgaagcgcttttcaaatggaaacaagatcaaacctattcaatacgtgaactttataacaaaagagaacttgaaacggaaggaggaggctgtaatggctgaacaaaaaggctaccttgtatttgacatcgggactgggaatgcgcgagtcgcggtcgtgactgccggcggcgaagtgaccgcgcttgaaagggaagacattgaatatgtgacggatccgctttatccggacggacgatatttctcaccggaagggttatggacgcaaatcagcgctatggcaagaaaggctattgccaagagccctcatattacattaatcggaatcacctcaacaagccagaggcagggaatcgttttgatcaataaagataaaaaggcatttctcggtctgcccaacattgataacagagggcgtgaatgggaaggcggaattgaggcagaagaagtgcatcagcaaaccggacgtcttccgagcgctttattttccgccatgaaacttgtcggattaaaagccagacagccgtctttatggaaagaagtgaagtgcatcacaagcatcagtgactgggtgacatttgagctgagcggaattttaagctatgaaccgtcacaggctgctgaaacactgctgtttgacgtaaggaaaaaggcgtggtcagagaaattatgcaacatcttcggtgtgccttctgccattcttccttcactcgtccgatctgggacggttgtcggaatgttaacgtttaagaaagcggcggtgctcggtctttctgaaagagtgcctgtgattgcaggcgggggagacacacagcttgccatcaaaagtgcagatgcaaagccgggagatatcgtcattgtatccggcacgacgacgccgattacaaagataacagcggagaccggaaccgaaagtttagagaatgcatggctgaattgccatacagaagaaggtgaatggcttcttgaaacgaatccgggtgtaacaggactcaattatcaaaaattaaaatccattttttatccgaatgaatcctacagcgtcatggaacgggaaatcgcaagtctgccgaaacatgatcatgcctgtatatctgcgttaggctcctatttatctcctgagaaaaacgcactggcaaaaggcggatttatttttgacgctccgctgtcccaaaacttaagcagagcccattttgtcaaagctgcactgctggaaatcgctttttcaatcaaatggaactatgaggcgttaacagaggcggcttccttttcacaagattatgtgaaggtgtgcggcggcggtttccaaagtgatgctttgacgcagtttcttgctaaccttcttcaaaagaaaatctataagagagaggggttcagccaggcatccgcaatgggagcggtgatgatttgcaacgaagctctcggtgtgaaagcagagctttcgacctgcacaaaggtaattgagccggaagcggatcagacggatctcttcctatatgaagaatggaaacatacccaaaaattatttactcattttcagccggcggtgaaagcctgacttggggatgagatgacaacatgaaagattgctgaggaggaacaaaaatgcttaataaaataggaattccgaaacagctcgcctggggatttttaggggtcgtgctgtttatgatgggggacggccttgaacaaggctggctcagcccgtttttagtcgaaaacggcttgacggtacagcaatcagcatccttgtttacggtttacggtatttctcttgctgtggcgtcgtggttttcaggagtctgcctcgaagccttcggcgcaaagcggacgatgtttatggggctgttgttttacgtcatcggaacagccgcgtttatcgcatacggatttgagaatcttaatttgccggtgatgtatgtcacgtattttattaaagggctgggttacccgctgtttgcctattcatttttgacatgggtgatttaccggtcgccgaaaaacaggctcagtacggcggtcggctggttctggattgcatattgctgcgggatgtttgtattcggtgcttggtattcaagctgggccatcaaatccttcggctatttgaatacgctgtggagttcaattttctgggtatgtctcggcgcgttttttgctttgattttaaatagggaccgctttgaaaagaaaaaggcagataagcgggaaaaggcgcaggaattaatgaagggaatcaccatccttgctgaaaatccgcgcgtgctctctggggggatcattcgaatcattaacagcatcggaacatacggatttccggtattcctcccgatgcatatggcgcagcacggcatttctacaaatgtatggctgcaaatttggggaacgatttttctcggaaatatcgtctttaacttaatcttcggcgcagtcggcgatgccttcggctggaaaaagactgtcatgtggttcggaggagtgggctgcggcatttttactcttttattatattatgctcctgttgtatcacatgggaatttgctgttcgtcagcattgtcggttttatatggggagggctcctcgccgggttcgttccgatcggggctatcgtgccgacggcggccggcagcaataaaggtgctgctatgtctgtgttaaatctggctgcgggcctgtcggcatttgtcggccccgcgcttgcctgggcgttcatcgggcttgtcggcgcacaaggcgttgtatggattttcgcagcgctctatttcgtaagtgcgatcttgacaaatcaaatcaaaatacctgaagagaaaacggcaaaacacaataaagcattgcctgaatacgcttcttaacagcagcgccccgaaaattcggggcgtttttttacggctgatgaagaaacccggcaaaccgctgaatttgttcacgtaacgattgtttgttttcgtgaaattgtttgaaacgatgtccgtttgctccggacggatgcgggaagccttccagaatgaccgcatggcccattctgcggttcttcttcagcgtgcggcaggctgattctgctgcttttccgagagggataagcagaatgtcttttttcatcatttctatttcatccggaaaacatgtcagcgcgtaacggctgagaagagctgatctgctgatggccggccggtgtcccgtatagtttttctgtttataaaaaacagggtgtttgataacggatgtcgtatgaagcagctccctttttgaatcaaaaaaccgggatgaatcctcaacgtgaagcgcggccggcagaccgcattcattaagcatttcgatgatgtgctgcctcatggaaccggaaagtccggccgctttttttgtctcatatgctatcacctcaagagattcgccgttttttaaaagctgtgccgctgctttgtacgcccgctgcatctgaaaaaaaccgggtgtaattccggagatgacaaccgcagcatgtgggttgatatactcattatgaggcgaataatacatatccagatctccgtccttggctaaatggaactccgaagtcagcaaatccgattttgtaaatcctcccgaagatgataatgctttaagctgctgcaaaaaatgcgcaagccgctcacgatcgcaaatcatgttatgcctccttgaatccgccagtttctcttagtgtcatcaaaaacgtcggatgacatgcaggctcataaaccgcttttaccggcgttccagagcattttcaggacgtgaggcgttcctttaacttcggctgccgtcgtttgcacggctgtttttttagtaagaaagtcttcctgcagttctttctgcttttgtgataacaaacgggtttctgttttgatttcttcaacggacgtctgcatggacgctgtcacggcgttaatcttctttatatcaggcgctgtgtttcttttaaaatgcacggcggatacggctgcataaattaaagcggcagccgcaacggcagcactgatatacaaaatgatgatcatctgcttttcactcctttttttcagttgataccctttacggatcgtgctgaatcattttatttgctaattgttttttttctgcttataatgtgaaatcgtacataaggacattcagaaagggtgaaagacatggaaagcttacaaaacaaaacggctcttatcacgggtgcgggcagaggaatcggccgcgccgccgctatcgctttagccaaagaaggagtcaatatcggtttaatcggccgtacagaagcaaatgtcgaaaaggttgcggaagaagtgaaagcccttggtgtaaaggcatcattcgctgctgccgatgtaaaaaaccaaaaagaggttgaacaagccgtctcttctattaaagaagaactcggtgaggttgacatcctgattaacaatgccggaatcagcaaattcggcggatttttggatcttacgcctcaagagtgggaagacatcattcaagttaatgtaatgggtgtataccacgtgacacgcgccgttcttcctgaaatgattgagagaaaatcaggagatatcattaatatttcttctacggcgggccaaagaggcgccgcggcgacaagtgcgtacagcgcttctaaatttgccgttctcggtctgaccgaatctctcatgcaggaagtcagaaaacacaatatccgtgtcagcgcaatgactccgagcacggttgcaagcgacatgtctattgaattaaatctgacagacggcaatccggaaaaagtcatgcagcctgaggatcttgcagaatatatggttgctcaattgaaattacacccgcgcattttcatcaaaactgccggtttgtggtcaactaatccttaatcaaaaggggacctgtctttgtgacgggtcttttttgttttcgcaacccgattaaataggcataaagatccgtttttgcagaaaaaagagtgaaaaagaaaccgatatcagctataattaaactaaataaactatgtaccaaatgttcaataagattatttttccccgcatccaaaaaacaaatcaatataaaccaaactgtccgaacaataaaagggaaaacgggatataaagagaatatttagtacatggaataatttgttagaaggaagggtgggcacatattgaaagaagaaaaaagaagttcaaccggttttttagtaaaacaaagagcctttttaaagctttacatgattacaatgacagagcaggaacggctttacggactgaagcttctcgaggtgctgcgttcggaatttaaacccatcggttttaagccgaatcataccgaggtgtaccgttcacttcacgaacttttggatgacgggattttaaagcaagtaaaagtgaaaaaagagggagccaaactccaggaagtcgttctctatcaatttaaagactatgaagctgcaaagctttacaaaaaacagctgaagacagagcttgaccgctgcaaaaagctgatagaaaaagccatttcagataatttttaaatccggccggaacgctcccggcctcccgggctcaaaaggtttgttctgtgattcattatacataataacaggctcggaacaatacatatcaataaaacctccaaacttgacatcgactcctgaagtggtaacataaaaaacgtgtgaaaaatacgaacaaaatacgaacaagggagatgttaccgatcttagatcaaaagaaagttgcttttatcggagcaggatcaatggctgaaggaatgatatcaggcatggtccgcgcaaaaaaaattcccaaccaaaacatctgcgtgacaaaccgccgcaatacagagcgactcgctgaattggaacatcaatacggaattcaaggcattgcttttgacagcatgaaaaccgaagacattgatgtctttattttagccatgaaaccgaaggatgctgaaatcgctcttgctacgctgaaacggcgtattcaacctcatcaaatcatcctgtctgttctggcaggcataacaacctcatttatacaacaatcattacatgaccgtcagccagttgtaagagtgatgccgaacacatccagcatgatcggcgaatcggcaacagctgcggctttcggagaccatgtctcttacggttcagcaaaaaccgcggtatctcttttggaatgcctcggggaagtgtacgtgatcaaggaagatcagatggacattttcaccggcatcgcaggcagcggaccggcgtacttttattatttaatggagtttattgaaaaagcaggtgaagaagccggcttagacaaacggctgtcccgcaaaatcggggcgcaaacgttattgggcgctgcaaaaatgctgatggaaacgggtgaaaaaccggatgtgcttcgggaaaacatcacctctccaaacggcacgacggaagccggcctcgatgcgctcaggtcagaaggcggcggagaagccattgccaaagccattaaacacgcgaccgaacgttctattgagatcagcaaaacaattgaaaaaacggcagcactataatcgttaaaaaacaggagtgatacagtgacgtctcggacgaagatcaaaagagtcgcggtgaaaatcggaagcagctcactgacgagcctgcacggggaaatcagcagaagaaagctggaagcattggtggatcaaatcgcacagctgaaggacagcggctatgaagtgattttaatatcttccggcgcagtggcggcaggttatcggaagctcggatttattcagaaaccggaaggcctccctgaaaaacaggcttctgcttccatcgggcagggattattaatggaggcttactcaaagctgtttttagcgcacggttatgtcgcatcacaaatattaattacaagaagcgatttttccgatgaataccgctaccataatgtgcgcaatacgatgaacgtccttttggaacggggcattattccgattattaatgaaaatgacacggtcacagtcaaccggctgaaattcggagataacgatacacttgcagcgaaggtggcaggtttaattgatgccgacatgcttgtaattttatcagacattgacggtttatatgatgataatccgcgcagcaacccgaaagcgaaaagaatcagacatgtaagtgacatcactccggaaatagaagcaagcgcgggagatgccgggagtgaaatgggaaccggcggaatgcgttcgaaactggatgcttttaagattgtgatggcctccggtattaaaggctttctcgggcaggctaacattccggacattctgcttcaagcggtagatgaggcggctgaaggaacttattttgaagcggaaggaaccctgccgttaaaccacaaagaacaatggcttgcatttaattccggccccgaaggcgaaattgtgatggaaaagaaaagcagccgcgatgtcgcaaacggaaatatggcgctgtcaccgcaggatatcgaacagattaagggcagattcagcagcggagcggttgtcaggctgcttgatcagcagggagaagagctcggactcggcatcgtcaactattcctcagcccagctgaagacatttaaagaaacgcctcacaaacagaccgatcaatcagtcattgatccggaagcgtttgtctgccacgttgaactatccattccgatcggctgagaaagatctataaaaatatgaaaaagcccgaggcttcgttttgaagctcgggtttgttttttattgatattgttcaagtttggagaaaaattgaatgacaaaatgatagaaatcatttgcagacggagccagttctcttccttttggtttaataatgcctacggtccgcttcacttgaggaaattcaatcggaattttgaccgtgaaccggggtgtggtttctgcaaaggtgctttcaggcaataaagtaactcccatccccgcggagactaatcctttaatggcatctaaatcctcgccttccgtcgatacaagcggcgcaaagccggcctgtctgcaagcgtcaatcgccatgtttcggagaataaacccttcaggaaataaaacgaattggtccccgcgcagatcaattaaatgaatatttttctgtttggcaagcggatgatgcagcggaacaagcgcgtaaatcttttccgtgaataagatattgcctgttatgtcggggaattccgtcggaacggggccgagcagcgcagcatctatatccctgtttcttaccgcttcgattaaaaacttataagaaccctggcggagcaaaaactcaacgttcgggtattcctctttaaatgccgaaatcacagtcggcaaaagctggcttgcaaggctcgtcggaaatcctattttgacggttccgcgattcggatcaagatattcatcaatttgttccttcgcataatcaattgctttcatcgccgttttaacatgttctaaaaattgtttgccgatcggcgttaatttaatatttctgccttcccgttcaaataaagtgactttcagctcttcttcaagatttgcaatctgccggctgatggcggattgtgcgacatgcagatgatcagccgcttctgacacatgttcccgttctgctacctccataaaataccgaagctggcgtaattccattgcgttcacacccatctatctcattttgagatgtatttgatctaaattatatattgtttatattgttttgaaaacttacaattaatttaaagttgtcagattttatgaccgataattaacggaaactgatcgggggagaggaattatgacttacaatcaaatgccgaaagcacaaggtctctaccgtccggaatttgagcacgatgcatgcggaatcggcttgtatgcccatttaaaagggaaaccttcacatgacattgtcaaaaaaggactgaagatgctttgccagctggatcacagaggaggacagggcagtgatccgaatacgggtgacggcgccggcctgatggttcagatccctgatgctttttttaagaaagagtgcggagaaatgaagctgccggaaaaaggccgttacggggtaggaatggtctttttctcgcaaaatgaagaggaaagaaaaaagatcgaaaaacaggtgaatgcattcattgagcaggaaggacagatcgttctcggctggagaaccgtccctgtaaatgtcggaaaaatcggaacagtggcacaaagcacttgcccgtatgtgcgtcaagtatttatcggagccgcaaacgatttgaaagacagccttgcttttgaacgcaaattgtatgttatccggaagcaggctgaaaattggggcgttcaagaacagcttgatttttacttcgcaagcctgtcaagccagactattgtttataaagggttgttaacgcctgagcaggttgacgctttttatttggatttgcaggatgaaaccttcgtatctgcattttcactcgtgcattcaagattcagcacaaatacctttcctacttgggaacgtgcccatccgaaccgctatctgattcataacggagaaatcaatacgctccggggcaacatcaattggatgagagcgagggagcagcagttcgtttcagaaagcttcggagacgatcttcacaaagtgctgccgattttaaatgctgagggcagtgactcatccattcttgataatgcgtttgaatttttcgtgatggcggggcggaaaccggcacatacggcaatgatgctgattccggaaccatggacggaaaacactcacatgtctaaagcgaaacgggctttttatgaatatcacagctctttaatggagccgtgggacgggccgaccgccatttcgtttacggacggaaaacaaatcggcgccatccttgaccgtaacggcctgcgtccggcacgttactatgtgacaaaagatgaccatattattttctcatctgaggtcggcgttattgaagtggagcagaagaacattcttcataaaaaacgtctggagcccggaaaaatgctgctcattgacttagaggaaggccggattatttcagatgaagaagtaaaaacagaaatcgccaatgaattcccgtatcaaaaatggcttgaagaagaattggttcaagtgaatcctgacccggaaatccgggaagaggaacaattcgatgatcttctcgtccgtcaaaaagcgtttggctatacgtatgaagatatccagaaatatttaattcctgttattaaagaaggcaaggacccgctcggctctatgggaaatgattcgccgctcgccgttttatccgatcgcgcccaatcactgtttcattactttaaacagctgtttgcgcaagtcacaaacccgccgattgacgcgatccgcgagcagcttgtgacctctacggtgacatggcttggggctgaaggtgatctgctgcatccgagtgaaagaaatgcacgccgcataaaattgtatactcctgtattatcaaacgaacagttttatgcgctgaaaacacttgtgcaccctgatattaagagccagaacatccgcacgctgttttccgatgacctggaaaaaggcctgaaggatttgtttcagcaagcggaaaaagcgatcaaggaaggcgtatctctgttaattttatctgacagggcaatgagtaaggaattgacgccgattccgccgcttttggccgtcagtgcgctgcatcagcatttgatccgtcaaggcctgcgaacaaaagcaagcattatcgttgaatccggggaagcgcgtgaagttcatcactttgcggctctcatcgggtatggtgccgatgctgtcaatccgtatttgacttatgctacgtataagcaggaaatcgatgaaggccggcttgatattccgtatgaagaagctgtcagcaaatacggaaagagcgtaacagaaggcgtcgtgaaagtgatgtcaaaaatggggatttcaactgtgcaaagttacaggggcgcccaaatttttgaagcggtcggcatcggtgaagacgttatcgccaaatactttaccggtactgcatctcagcttggcggaatcgatatcgagacgattgcgcaagaagcgaaacagcgccatcaagcggcgtacaaggatgattacagccaaactcttgatcctggaagtgaattccaatggcggaacgggggagagcaccacgctttcaacccgaaaaccatccatacgctgcaatgggcctgccgaaaaaatgattacagcttgtttaagcagtattctcatgcagcggatgaagaacgaatcggatttttacgcaatctgttcgccttcaaagaagaccgcaagcctttaaaattagaggaagttgaatcagctgcgtccatcgtgaaacgttttaaaacaggagcgatgtcattcggttcattaagcaaggaagcccatgaggctttagcgatagcgatgaacaggcttggcggaaaaagcaacagcggagaaggcggcgaggacccgaaacgtttcgttccggatgaaaatggcgacgacagaagaagtgcgattaaacagatcgcctccggccgtttcggcgtaaagagccattatctcgtcaatgcggatgaattgcagatcaaaatggcgcaaggagcgaagccgggagaaggcggtcagcttccggggaacaaagtatatccttgggtcgcggatgtccgcggttctacaccaggtgtagggctgatctcaccgcctcctcaccatgatatttattcaattgaagatttggcgcagctgatccatgatttgaaaaatgcaaatcgaagcgcgcgaatcagcgtcaagctcgtgtcaaaagccggtgtcggcacgattgcggccggtgtggcaaaaggcactgcggatgtcatcgtcatcagcggctacgatggcggaacgggcgcatcgccgaaaacgagtattaaacataccggtcttccgtgggagcttggtcttgcagaagctcaccaaacgctgatgctgaacggtttacgggatcgcgtggtattggaaacggacggtaagctgatgacaggccgagatgtcgtgatggccgccttgctcggtgcggaggaattcggctttgctacagcgccgcttgtcgttcttggctgcatcatgatgcgcgcctgccatttagatacatgtcctgtaggtgtcgcgacgcaaaatccggagctccgcaaaaaattcatgggcaatcctgaccatatcgtaaattacatgctgtttgtcgcagaagaagtgcgtgaatatatggcgcagttaggctttaagacgcttgatgaaatgatcggacggacagacgttcttcatgtcagtgaacgtgcgaaagcgcattggaaagcgggccagcttgatttatccacactgctgtaccagcctgaaggcatacgcactttccgtacggcgcaaaaccataaaatcgacgagtcgcttgatatgacggttattcttccggcggtgcaggctgcaattgaagccggtcaggaagcggaagctgaaatcaagatcaataatacaaaccgcgtagccggaaccgtgacgggaagtgaaatttctaaacgctacggagcggaaggcctgccggatgatacgatcagacttcattttaccggatcagccggacagagtttcggtgcatttgtccctaaagggatgacgcttcatttgaacggggattcaaatgactacgtaggcaaagggctttcaggcggaaaaatcatcgtgaaagcgcctgatgccttcaattatgaaacacacgataacgttattatcgggaacgtcgcattttacggagcaacaagcggggaagcgtacattaacgggcgcgccggtgaacgttttgcagtccgtaacagcggagtcaatgtcgttgtagaaggtatcggagaccacggctgcgaatacatgacaggcggccgggttgtcgtcctcggcgaagtcggcaaaaacttcggggcgggaatgtcaggcggtatcgcatacgtcctgagtgaagatgccaaagcatttaaacgcaaatgcaacatggaaatgatttcatttgaaaagctgacggatgaggcggagatcaaagaagtgcaagaaatggtcaaacggcatgcggcgctgacaaacagcaaaaaagccgcaaatctcctggacaattgggaaaaagccgcagaaacctttatcaaagtcattccgaaaaactataaacaaatgctcctcagcatcgaagaacaaaaagcggcgggtttatcagaagaagacgcaattatgtatgcttttgaagccaatacaaaggttcagcaaacgcctgccaaagatcaaaaacaagcggtagtacagtaagaaaggggagaggaacatggggaaaccaactggattcatggaagaaaaacgagaaaaaccggctgagcgggaccctctcactcgcttaaaggattggaaagagtattcggctccattttcagatgaagcgtcaaagcggcagggggcgcggtgtatggattgcggcacaccgttttgccaaatcggcgctgatatcaacggttttacctccggatgcccgatttataatctgataccggagtggaatgacctcgtctatcgggggcgctggaaagaagccttggagcgccttctgaaaacgaataactttcctgaattcacagggcgggtctgtcccgctccttgtgaaggatcttgtacgctggccatttcagatccggctgtttcaattaaaaacatcgagcggacgatcattgacaaaggttttgaaaatggatggattcagccgagaattcccgcgaaacgcacaggtaaaaaagtcgctgtcgtcggttcaggcccggcaggtctggcaagcgctgatcagctgaatcaagccggtcattccgtaacggtctacgagcgtgccgacagagccggcggcctgctgatgtacggcattccgagcatgaagcttgagaaaaatgtcgtcgaacgccgtattaagcttttgacgcaggaaggtatagattttgtgacaaataccgaaatcggcgttgatataacggcagatgagctgaaagaacaatttgatgccgtcattttgtgcacaggcgcccaaaagcagcgcaatctgctgattgaaggccgggaagcaaaaggcgtccattatgcgatggactatttaacactggcgacgaaaagctatttagattccaacttcaaagacaaacaatttatagacgctaaagggaaagatgtcatcgtgatcggcggaggagacacaggagctgactgcgtggcaaccgcgctgcgtcaaaaagcgcgcagcgtgcaccagttcgggaaacatcctaaacttcctcagacgcgcacgaacgacaatatgtggcctgaacagccgcacgtctttacccttgaatacgcctatgaagaagcgcaggcaaagttcggcaaagacccgagagaatattcaattcaaacgacaaaaatggtggccgataagcagggccgcttacaagagatccacaccattcaaatggaaaaagtcagaaacgaattcggaaagtatgaatttcatgaactgcccggtacagaaaaagtctggcctgctcagctggtgttcatcgccatcggttttgaagggacagaacagccattattgaaacagttcggagtcgattcggcaaatcataaaattcaggcggcatatggggattataaaacgaatgttgacggtgttttcgccgcaggggatgcgagaaggggccaaagcctgattgtatgggcgattaatgaaggccgggaagcagcgcgcgaagtcgacagttatttaatggggagcactgttttaccgtaaataaaggggtttatttataaaaccggctgggatcagccggtttttcgtattgaaatggaacctccttcttcttgtattggtcatataaaggtaatgtggaaatggaggataaatatggaattttgttttacagagcggagagattgtttttttccgcagactgatacgatttgcaagccttgcgcaatcgatcagggtgctgctgacggcggaagtcatcgctgccgtttaaaatgacgccttaaaaaacatgacgggctctgtgtgtctgcagtcgatttgcgggcagattttaatcgatgaagaaaaacatattgaatttcaagcggaaacgcttaaaaacaaataagggaacggacgggtccgttcctttttttagacatctatacgaaagccgatattgccgaactgccgtccttcccgcattctgttaaaagcgggagctgcttcactgagagggtacatgcggtcgataatgggacggagctcgcagcggtttatcaattccagcatatccgcgaattcctcattgcttcccattgatgtaccgagaatatgaatctgcggaaaaaacagcgagcgaatgggaaatccgagctgatcgcctgaactggcgccgaatgttacgatccggccattcggtttaataatgtcaagatagtgttgatataaagcggggcctacaccgtcaagtatgatatctgctttttcgccattcagcgcctcattccagtcaccgtagctgtcaatcgcccggtctgcaccgtatgacagtgcggtttgttttttgttttcactgcgggaggtgacgctgactgtcgctccgatagcttttgccattaataaggcatatgttgccacgccgcttccgatgcccggaaggataaggtgttcgcctttttttaattgtccttttgtaaataaggcgcgataagcggttaatgctgataacggcaggacgcccgcttcctcccaagtcaggtgttcgggttttaaaacggcattttccgcaggaacgatgacataaggtgaaaatgttccgtcgctcggaccgcctaaaatatcagggacggctggtacgtcctcaacagtcttccaattcagtaccgggttgatgatgacttctgcattcagtaaatgagaccggacgccgtgtcctatttcggttacgattcccgcgccgtctgaaccgagaataaattcatggtttccggtttcgtgttttttcattaaaaacaaatcacgatggtttaatccggctgttttcagctttatttttacttcgccgtttcccggccttttgtcaggtgcctgcctgaaattaaagccattttcgtgtatgataaggacattcatgattcttctctcctttatgattgatgagaaaaattttacaggctgtatcagctgcagtaaataaatgaaaattgatagccggctatcaataaaaatcatagcaagaaggtgcccttagatggaaagcggagacttaaagatttttcaggctgtcgcccgcaaaggaagtatttcaaaggcggcagaaagcctgcattatgttcaatcaaatgtgacaaaccggattcagcagctggaacggcaattgcaaacacagcttttttaccgcacaaatcggggaatgacgctgacgccaacaggtgaaaacttattaaaagacgcagacagaatccttcaattgctgcatgaggcgcaaaaaacagcgcgagaggcaggcgatccgaacggcccgcttcgaatcggttctcttgaaacggcggcagccgtccatctccctcaatttttcacggagtattgcagccgctacccgaaagtacagctgtctctgtcaaccggtgatacacataccttagtgcagcgcgttctacactatgagctggacggcgcttttgtttacggaccggtcgaatatgaagatcttgagcaagtcgctgtatttcaagaagaattggtcttggtttcaaataagcgggaaggcagtttgcaagacttgctgcgagagccgattctgtattttgccgcgggctgttcgcaccgccgcaaaataaaaaacatactgaaagaagaggcagtgcccgcacataaaatcattgaattcggtacgttggaagccattattggggcggtgcaggcggggatgggggtctcctttctgcctgcatcagccgtccgttattttcaaaacaggaaaaatctttttcttcatgagcttcctgaacattttcggaatatgaatatatcattcatctaccggagtgatttatttttaacatcggcgtttgaagaactgctgaatggattaaaaacattatcgaacagaagatgagaaaacaggacagctgtgtacgccaattttttttcgttccggtttttctcaaaaagaaagcgggtatccgggctgagctcgatcagcgtgatgaaaaactcggctataaaatcagagaagcacaaatgaaaaaaataccgtatatggcggttgtgggagatcaagagtgccgccaccattctgtacatgtaaggcaatacgggcgggaaaacacatttgaagagaatgtgagtgattttatttcccggatcataagagagacaaaacaaaaaatagagattcaagaaaaataacattgacatatcgcaaaatcacgatataataaagcgtatgaaacctattgatgtttttaaagcgttgtctaatgagtcacggcttgagattttacaatggctgaaagagccggaccgtcacttcgcaccgcatgatggcattgatatgaatgagatcggagtatgtgtcagccagatcaccgataagcttcagatgacacagtcaacggcgtctcaatatctttccattcttcagcgcgcaggccttatccaaacaaaacggattggcaaatacacctattataaaagagatgaagatgcgataaaggcgatggccgattattttcagcgcgaaatgtagggctgaatcctttagaagagggattcagtttcttttttcgactacacatcgacatattgcgatttgtttctgtttgttcaattctttatatcgatatatcacaatatatctttatataaattatcaatgaaggagtgtgtcaggtgcaaaatacctggaagatttacattttggcaattatcagctttttagtggggacgtctgaatatgtgatatccgggatgcttgataaaattgcaggttccttgggagttactgtggcagcagcagggcagctgattacgatt
